(19) United States
(12) Patent Application Publication
(10) Pub. No.: US 2023/0235384 A1
(43) Pub. Date: Jul. 27, 2023

(54) COMPOSITIONS AND METHODS FOR IN SITU SINGLE CELL ANALYSIS USING ENZYMATIC NUCLEIC ACID EXTENSION

(71) Applicant: NanoString Technologies, Inc., Seattle, WA (US)

(72) Inventors: Jonathan CHENG, Alameda, CA (US); Dwayne DUNAWAY, Seattle, WA (US); Mark GREGORY, Boise, ID (US); Jaemyeong JUNG, Bellevue, WA (US); Rustem KHAFIZOV, Seattle, WA (US); Dae KIM, Bellevue, WA (US); Evan Paul PERILLO, Woodinville, WA (US); Tushar RANE, Seattle, WA (US); Lidan WU, Seattle, WA (US)

(21) Appl. No.: 18/010,873

(22) PCT Filed: Jun. 17, 2021
(86) PCT No.: PCT/US2021/037772

§ 371 Date: Dec. 16, 2022

Related U.S. Application Data
(60) Provisional application No. 63/040,651, filed on Jun. 18, 2020.

(51) Int. Cl. C12Q 1/6841; C12Q 1/6851; C12Q 1/6806

(52) U.S. Cl. CPC C12Q 1/6841; C12Q 1/6806; C12Q 1/6851; C12Q 2600/16

(57) ABSTRACT

The present disclosure is based in part on probes, compositions, methods, and kits for simultaneous, multiplexed spatial detection and quantification of protein and/or nucleic acid expression in a user-defined region of a tissue, user-defined cell, and/or user-defined subcellular structure within a cell.--

### CROSS-REFERENCE TO RELATED APPLICATIONS

[0001] This application claims priority to, and the benefit of, U.S. Provisional Application No. 63/040,651, filed Jun. 18, 2020, the contents of each of which are incorporated herein by reference in their entireties.

### SEQUENCE LISTING

[0002] The instant application contains a Sequence Listing which has been submitted in ASCII format via EFS-Web and is hereby incorporated by reference in its entirety. Said ASCII copy, created on Jun. 16, 2021, is named “NATE-046_001WO_SeqList.txt” and is about 1.96 MB in size.

### BACKGROUND OF THE INVENTION

[0003] Standard immunohistochemical and in situ hybridization methods allow for simultaneous detection of, at most, six to ten protein or nucleic acid targets, with three to four targets being typical. There exists a need for probes, compositions, methods, and kits for simultaneous, multiplexed detection and quantification of protein and/or nucleic acid expression in a user-defined region of a tissue, user-defined cell, and/or user-defined subcellular structure within a cell at a high enough resolution and with minimal background noise to do so. Furthermore, there is a need for such systems to be adaptable for use with existing sequencing technologies that are already available to a large number of end users.

### SUMMARY OF THE INVENTION

[0004] The present disclosure provides a method for in situ synthesis of a nucleic acid sequence in a tissue sample, the method comprising: a) contacting the tissue sample with at least one probe, wherein the probe comprises a target-binding domain and a target identification domain, wherein the probe comprises a free 3′-OH moiety, and wherein the target-binding domain binds to at least one target molecule at a first location of the tissue sample; b) ligating a nucleotide to the free 3′-OH moiety of at least one bound probe by contacting the free 3′-OH moiety with at least one nucleotide-polymerase complex, thereby extending at least one bound probe, wherein the at least one nucleotide-polymerase complex comprises the nucleotide operably linked to a polymerase via a photocleavable linker, c) illuminating the first location of the tissue sample with light sufficient to cleave the photocleavable linker of the at least one nucleotide-polymerase complex, thereby releasing the polymerase and exposing a free 3′-OH moiety on the extended at least one bound probe; and d) repeating steps (b) and (c) until the nucleic acid sequence has been synthesized.

[0005] The present disclosure provide a method for in situ synthesis of a nucleic acid sequence in a tissue sample, the method comprising: a) contacting the tissue sample with at least one probe, wherein the probe comprises a target-binding domain and a target identification domain, wherein the probe comprises a free 3′-OH moiety, and wherein the target-binding domain binds to at least one target molecule located at a first location of the tissue sample; b) ligating a nucleotide to the free 3′-OH moiety of at least one bound probe by contacting the tissue sample with at least one reversible terminator nucleotide and at least one polymerase, thereby extending the at least one bound probe, wherein the at least one reversible terminator nucleotide comprises the nucleotide operably linked to a 3′ terminator moiety via a photocleavable linker; c) illuminating the first location of the tissue sample with light sufficient to cleave the photocleavable linker of the at least one reversible terminator nucleotide, thereby releasing the 3′ terminator moiety and exposing a free 3′-OH moiety on the extended at least one bound probe; and d) repeating steps (b) and (c) until the nucleic acid sequence has been synthesized.

[0006] In some aspects of the preceding methods, a target-binding domain binds to at least one target molecule at an at least second location of the tissue sample, and wherein the method further comprises repeating steps (b) - (d) at the at least second location.

[0007] In some aspects of the preceding methods, a nucleic acid sequence synthesized at the first location of the tissue sample is different than the nucleic acid sequence synthesized at the at least second location of the tissue sample.

[0008] The present disclosure provides a method of producing a spatially-resolved profile of the abundance of at least two target analytes in a first and an at least second location of a tissue sample comprising: a) contacting the tissue sample with a solution comprising at least two species of probes, the probes comprising a target-binding domain and a target identification domain, wherein each species of probe comprises a unique target-binding domain that binds to one of the at least two target analytes and a unique target identification domain specific for the target analyte, and a free 3′-OH moiety; b) ligating a nucleotide to the free 3′-OH moiety of at least one bound probe by contacting the tissue sample with a first plurality of nucleotide-polymerase complexes, thereby extending the barcode domain of the at least one bound probe and forming a spatial barcode domain, wherein at least one nucleotide-polymerase complex in the first plurality comprises the nucleotide operably linked to a polymerase via a photocleavable linker; c) illuminating at least one location of the tissue sample with light sufficient to cleave the photocleavable linker of the nucleotide-polymerase complexes, thereby releasing the polymerases and exposing a free 3′-OH moiety on the spatial barcode domain at the at least one location of the tissue sample; d) ligating a nucleotide to the free 3′-OH moiety of the spatial barcode domain of at least one bound probe at the at least one location illuminated in step (c) by contacting the tissue sample with an additional plurality of nucleotide-polymerase complexes, thereby extending the spatial barcode domain of the at least one bound probe, wherein at least one nucleotide-polymerase complex in the additional plurality comprises the nucleotide operably linked to a polymerase via a photocleavable linker; e) repeating steps (c) and (d) until the spatial barcode domain of at least one probe bound to a target analyte in the first location of the tissue sample has been extended such that the spatial barcode domain comprises a unique nucleic acid sequence specific to the first location of the tissue sample, and the spatial barcode domain of at least one probe bound to a target analyte in the at least second location of the tissue sample has been extended such that the spatial barcode domain comprises a unique nucleic acid sequence specific to the at least second location of the tissue sample; f) collecting the probes bound to target analytes in the tissue sample; and g) quantifying via sequencing the probes collected in step (f), thereby determining the abundance of the at least two target analytes in the first and the at least second location of the tissue sample, thereby producing a spatially-resolved profile of the abundance of the at least two target analytes.

[0009] The present disclosure provides a method of producing a spatially-resolved profile of the abundance of at least two target analytes in a first and an at least second location of a tissue sample comprising: a) contacting the tissue sample with a solution comprising at least two species of probes, the probes comprising a target-binding domain and a target identification domain, wherein each species of probe comprises a unique target-binding domain that binds to one of the at least two target analytes and a unique target identification domain specific for the target analyte, and a free 3′-OH moiety; b) ligating a nucleotide to the free 3′-OH moiety of the barcode domain of at least one bound probe by contacting the tissue sample with a first plurality of reversible terminator nucleotides and a first plurality of polymerases, thereby extending the at least one bound probe and forming a spatial barcode domain, wherein at least one reversible terminator nucleotide in the first plurality comprises the nucleotide operably linked to a 3′ terminator moiety via a photocleavable linker; c) illuminating at least one location of the tissue sample with light sufficient to cleave the photocleavable linker of the reversible terminator nucleotides, thereby releasing the reversible 3′ terminator moieties and exposing a free 3′-OH moiety on the spatial barcode domain at the at least one location of the tissue sample; d) ligating a nucleotide to the free 3′-OH moiety of the spatial barcode domain of at least one bound probe at the at least one location illuminated in step (c) by contacting the tissue sample with an additional plurality of reversible terminator nucleotides and an additional plurality of polymerases, thereby extending the spatial barcode domain of the at least one bound probe, wherein at least one reversible terminator nucleotide in the additional plurality comprises the nucleotide operably linked to a reversible 3′ terminator moiety via a photocleavable linker; e) repeating steps (c) and (d) until the spatial barcode domain of at least one probe bound to a target analyte in the first location of the tissue sample has been extended such that the spatial barcode domain comprises a unique nucleic acid sequence specific to the first location of the tissue sample, the spatial barcode domain of at least one probe bound to a target analyte in the at least second location of the tissue sample has been extended such that the spatial barcode domain comprises a unique nucleic acid sequence specific to the at least second location of the tissue sample; f) collecting the probes bound to target analytes in the tissue sample; and g) quantifying via sequencing the probes collected in step (f), thereby determining the abundance of the at least two target analytes in the first and the at least second location of the tissue sample, thereby producing a spatially-resolved profile of the abundance of the at least two target analytes.

[0010] In some aspects, the preceding methods can further comprise comparing the abundance of the at least two target analytes in the first location of the tissue sample and the at least two target analytes in the at least second location of the tissue sample.

[0011] A polymerase can be a terminal deoxynucleotidyl transferase or a biologically-active portion thereof.

[0012] An at least one reversible terminator nucleotide can comprise 3′-O-(2-nitrobenzyl)-dATP, 3′-O-(2-nitrobenzyl)-dCTP, 3′-O-(2-nitrobenzyl)-dGTP or 3′-O-(2-nitrobenzyl)-dTTP.

[0013] A 3′ terminator moiety can comprise 2-nitrobenzyl.

[0014] A probe can further comprise a unique molecular identifier. A unique molecular identifier can be at least about 14 nucleotides in length.

[0015] A probe can further comprise an amplification primer binding site. An amplification primer binding site can be at least about 24 nucleotides in length.

[0016] A probe can further comprise a constant region. A constant region can be at least about 12 to at least about 20 nucleotides in length.

[0017] A probe can comprise, from 5′ to 3′, a target binding domain, followed by a amplification primer binding site, followed by a unique molecular identifier, followed by a target identification domain, followed by a constant region.

[0018] In some aspects of the preceding methods, a spatial barcode domain of at least one probe bound to a target analyte in the first location of the tissue sample comprises a unique spatial identifier sequence specific to the first location of the tissue sample. In some aspects of the preceding methods, a spatial barcode domain of at least one probe bound to a target analyte in the at least second location of the tissue sample comprises a unique spatial identifier sequence specific to the at least second location of the tissue sample.

[0019] A spatial identifier sequence can comprise at least about 20 nucleotides.

[0020] A spatial identifier sequence can comprise at least four spatial identification domains. Each of the at least four spatial identification domains can comprise the same number of nucleotides. At least one of the at least four spatial identifications domains can comprise a different number of nucleotides as compared to another spatial identification domain within the same spatial barcode. Each spatial identification domain can comprise about 1 to about 4 nucleotides. Each spatial identification domain can comprise about 4 nucleotides. Each of the at least four spatial identification domains can comprise the same nucleotide at the 3′ terminus

[0021] In some aspects of the preceding methods, the method can further comprise, after step (e) and prior to step (f), repeating steps (c) and (d) to extend the spatial barcode domain in each location of the tissue sample such that the spatial barcode domain comprises, at the 3′ end, a delimiting domain.

[0022] In some aspects of the preceding methods, the method can further comprise, after step (e) and prior to step (f), extending the spatial barcode domain in each location of the tissue sample such that the spatial barcode domain comprises a polyT domain.

[0023] In some aspects of the preceding methods, the method can further comprise, after step (e) and prior to step (f): (i) repeating steps (c) and (d) to extend the spatial barcode domain in each location of the tissue sample such that the spatial barcode domain comprises, a delimiting domain; and (ii) extending the spatial barcode domain in each location of the tissue sample such that the spatial barcode domain comprises a polyT domain.

[0024] A delimiting domain can be at least about 4 to at least about 6 nucleotides in length. The sequence of the delimiting domain is the same for every spatial barcode in the sample.

[0025] A polyT domain can comprise at least about 14 nucleotides.

[0026] In some aspects of the preceding methods, the illumination in step (c) can provided by a light source selected from the group consisting of an arc-lamp, a laser, a focused UV light source, and light emitting diode. A laser can be an infrared laser.

[0027] In some aspects of the preceding methods, the illumination in step (c) can be provided by a two-photon excitation microscope.

[0028] In some aspects of the preceding methods, the first location of the tissue sample and the second location of the tissue sample can be no more than about 500 nm in the x and/or y direction and no more than about 1500 nm in the z direction.

[0029] In some aspects of the preceding methods, the first location of the tissue sample and the at least second location of the tissue sample can be subcellular.

[0030] In some aspects of the preceding methods, the first location of the tissue sample and the at least second location of the tissue sample each can comprise no more than one cell.

[0031] In some aspects of the preceding methods, the first location of the tissue sample and the at least second location of the tissue sample each can comprise no more than ten cells.

[0032] In some aspects of the preceding methods, each cell within the first location of the tissue sample and the at least second location of the tissue sample can be individually automatically identified and encoded.

[0033] In some aspects of the preceding methods, the method can further comprise prior to step (a), subjecting the tissue sample to ddTTP (dideoxthymidine-triphosphate) termination. Subjecting the tissue sample to ddTTP termination can comprise contacting the tissue sample with ddTTP and TdT.

[0034] In some aspects of the preceding methods, the method can further comprise after step (f) and prior to step (g), amplifying the collected probes. Amplifying the collected probes can comprise the use of a first amplification primer and a second amplification primer, wherein the first amplification primer comprises a first flow cell adapter sequence, a first NGS index sequence and a first sequencing primer binding site, and the second amplification primer comprises a second flow cell adapter sequence, a second NGS index sequence and second sequencing primer binding site. At least one of the first and the second amplification primers can comprise a nucleic acid sequence that is complementary to the delimiting sequence and/or the polyT domain.

[0035] Any of the above aspects can be combined with any other aspect.

[0036] Unless otherwise defined, all technical and scientific terms used herein have the same meaning as commonly understood by one of ordinary skill in the art to which this disclosure belongs. In the Specification, the singular forms also include the plural unless the context clearly dictates otherwise; as examples, the terms “a,” “an,” and “the” are understood to be singular or plural and the term “or” is understood to be inclusive. By way of example, “an element” means one or more element. Throughout the specification the word “comprising,” or variations such as “comprises” or “comprising,” will be understood to imply the inclusion of a stated element, integer or step, or group of elements, integers or steps, but not the exclusion of any other element, integer or step, or group of elements, integers or steps. About can be understood as within 10%, 9%, 8%, 7%, 6%, 5%, 4%, 3%, 2%, 1%, 0.5%, 0.1%, 0.05%, or 0.01% of the stated value. Unless otherwise clear from the context, all numerical values provided herein are modified by the term “about.”

[0037] Although methods and materials similar or equivalent to those described herein can be used in the practice or testing of the present disclosure, suitable methods and materials are described below. All publications, patent applications, patents, and other references mentioned herein are incorporated by reference in their entirety. The references cited herein are not admitted to be prior art to the claimed invention. In the case of conflict, the present Specification, including definitions, will control. In addition, the materials, methods, and examples are illustrative only and are not intended to be limiting. Other features and advantages of the disclosure will be apparent from the following detailed description and claim.

### BRIEF DESCRIPTION OF THE DRAWINGS

[0038] The above and further features will be more clearly appreciated from the following detailed description when taken in conjunction with the accompanying drawings.

[0039] FIG. 1 is an exemplary schematic of an in situ nucleic acid synthesis method of the present disclosure.

[0040] FIG. 2 is an exemplary schematic of an in situ nucleic acid synthesis method of the present disclosure.

[0041] FIGS. 3A-3N is an exemplary schematic of the steps of a method of producing a spatially-resolved profile of the abundance of at least one target analytes in at least two location of a tissue sample.

[0042] FIGS. 4A-4N is an exemplary schematic of the steps of a method of producing a spatially-resolved profile of the abundance of at least one target analytes in at least two location of a tissue sample.

[0043] FIG. 5A is an exemplary optical schematic of a two-photon excitation method that can be used in the methods of the present disclosure.

[0044] FIG. 5B is an exemplary optical schematic of a two-photon excitation method that can be used in the methods of the present disclosure.

[0045] FIG. 6 shows the structures of various proparglyamino dNTPs.

[0046] FIG. 7 shows the structure of BP-23354.

[0047] FIG. 8 is a schematic of an exemplary nucleotide-polymerase complex preparation method.

[0048] FIG. 9 shows the structures of various reversible terminator nucleotides for use in the methods of the present disclosure.

[0049] FIG. 10 is an exemplary schematic of a probe of the present disclosure.

[0050] FIG. 11 is an exemplary schematic of the probe of FIG. 10 that has been extended using TdT extension in the methods of the present disclosure to form a spatial barcode domain, wherein the spatial barcode domain comprises four spatial identification (ID) domains.

[0051] FIG. 12 is an exemplary schematic of the probe of FIG. 10 that has been extended using TdT extension in the methods of the present disclosure to form a spatial barcode domain, wherein the spatial barcode domain comprises four spatial identification (ID) domains and a delimiting domain.

[0052] FIG. 13 is exemplary schematic of the probe of FIG. 10 that has been extended using TdT extension in the methods of the present disclosure to form a spatial barcode domain, wherein the spatial barcode domain comprises four spatial identification (ID) domains, a delimiting domain and a polyT domain.

[0053] FIG. 14A is an exemplary schematic of an extended probe of the present disclosure, and two amplification primers of the present disclosure.

[0054] FIG. 14B is an exemplary schematic of an extended probe of the present disclosure and two amplification primers of the present disclosure. The second amplification primer comprises two degenerate bases (“BN”) at the 3′ end.

[0055] FIG. 15 is an exemplary schematic of a primer design for use in an amplification experiment to test for the presence and amplification of the probes of the present disclosure.

[0056] FIG. 16 is an image of gel-electrophoresis analysis of the amplification of probes of the present disclosure using amplification primers of the present disclosure.

[0057] FIG. 17 is an exemplary schematic of a primer design for use in an amplification experiment to test for the presence and amplification of the probes of the present disclosure.

[0058] FIG. 18 is an image of gel-electrophoresis analysis of the amplification of probes of the present disclosure using amplification primers of the present disclosure.

[0059] FIG. 19 is a chart showing the recovery of DNA, including probes, from tissue samples as part of the methods of the present disclosure.

[0060] FIG. 20 is an exemplary schematic of a probe of the present disclosure.

[0061] FIG. 21 is exemplary schematic of the probe of FIG. 20 that has been extended using TdT extension in the methods of the present disclosure to form a spatial barcode domain, wherein the spatial barcode domain comprises four identification (ID) domains, a delimiting domain and a polyT domain.

[0062] FIG. 22 is a series of images showing the improved photocleaving results obtained using two-photon illumination in the methods of the present disclosure.

[0063] FIG. 23 is an exemplary schematic of a method of purifying the probes collected from a tissue sample as part of quantifying the probes via sequencing.

### DETAILED DESCRIPTION OF THE INVENTION

[0064] The present disclosure is based in part on probes, compositions, methods, and kits for simultaneous, multiplexed spatial detection and quantification of protein and/or nucleic acid expression in a user-defined region of a tissue, user-defined cell, and/or user-defined subcellular structure within a cell using existing sequencing methods.

[0065] The present disclosure provides a comparison of the identity and abundance of target proteins and/or target nucleic acids present in a first region of interest (e.g., tissue type, a cell (including normal and abnormal cells), and a subcellular structure within a cell) and the identity and abundance of target proteins and/or target nucleic acids present in a second region of interest. There is no pre-defined upper limit to the number of regions of interest and comparisons that can be made; the upper limit relates to the size of the region of interest relative the size of the sample. As examples, when a single cell represents a region of interest, then a section may have hundreds to thousands of regions of interest; however, if a tissue section includes only two cell types, then the section may have only two regions of interest (each including only one cell type).

[0066] The present disclosure provides a higher degree of multiplexing than is possible with standard immunohistochemical or in situ hybridization methods. Standard immunohistochemical methods allow for maximal simultaneous detection of six to ten protein targets, with three to four protein targets being more typical. Similarly, in situ hybridization methods are limited to simultaneous detection of fewer than ten nucleic acid targets. The present disclosure provides detection of large combinations of nucleic acid targets and/or protein targets from a defined region of a sample. The present disclosure provides an increase in objective measurements by digital quantification and increased reliability and consistency, thereby enabling comparison of results among multiple centers.

[0067] As opposed to other methods known in the art, the methods of the present disclosure do not require sequential fluidic steps to extract probes/barcodes from specific regions of a tissue sample.

[0068] Moreover, as opposed to other methods known in the art that rely on digital micromirror-directed illumination systems, the methods of the present disclosure are compatible with two-photon illumination systems, including point scanning two-photon systems. The two-photon illumination systems exhibit increased spatial resolution, allowing the illumination of a single region of interest (ROI) that is as small as a single cell or even a subcellular structure within a single cell.

[0069] Various compositions and methods of the present disclosure are described in full detail herein.

### Methods of the Present Disclosure

[0070] In some aspects, the methods described herein can be referred to as a “DNA writing microscope,” that can use a combination of two-photon microscopy and photo-activatable chemistry to create single-cell spatial barcodes in situ, thereby allowing for the quantification of gene-expression at single-cell resolution in a spatially resolved manner.

[0071] The present disclosure provides a method for in situ synthesis of a nucleic acid sequence in a tissue sample, the method comprising: a) contacting the tissue sample with at least one probe, wherein the probe comprises a target-binding domain and a target identification domain, wherein the probe comprises a free 3′-OH moiety, and wherein the target-binding domain binds to at least one target molecule at a first location of the tissue sample; b) ligating a nucleotide to the free 3′-OH moiety of at least one bound probe by contacting the free 3′-OH moiety with at least one nucleotide-polymerase complex, thereby extending the at least one bound probe, wherein the at least one nucleotide-polymerase complex comprises the nucleotide operably linked to a polymerase via a photocleavable linker, c) illuminating the first location of the tissue sample with light sufficient to cleave the photocleavable linker of the at least one nucleotide-polymerase complex, thereby releasing the polymerase and exposing a free 3′-OH moiety on the extended at least one bound probe; and d) repeating steps (b) and (c) until the nucleic acid sequence has been synthesized.

[0072] An exemplary schematic of the preceding method is shown in FIG. 1. In FIG. 1, a probe with a free 3′-OH is provided (top, “ISH probe with free 3′-OH″). This probe is then extended by ligating a nucleotide to the free 3′-OH moiety by contacting the free 3′-OH moiety with a nucleotide polymerase complex comprising a nucleotide operably linked to a polymerase via a photocleavable linker. In this non-limiting example, the polymerase is terminal deoxynucleotidyl transferase (TdT). The nucleotide (boxed “N”) is operably linked to the TdT molecule via a photocleavable linker (represented by the star shape in FIG. 1). In the next step, de-protection, the photocleavable linker is cleaved by illuminating the probe and nucleotide-polymerase complex with light of a wavelength sufficient to cleave the photocleavable linker (in this non-limiting example, the light is UV light with a wavelength of about 365 nm). This releases the polymerase from the extended probe, exposing a free 3′-OH moiety on the extended probe. The process can then be repeated until the desired nucleic acid sequence has been synthesized.

[0073] The present disclosure provides a method for in situ synthesis of a nucleic acid sequence in a tissue sample, the method comprising: a) contacting the tissue sample with at least one probe, wherein the probe comprises a target-binding domain and a target identification domain, wherein the probe comprises a free 3′-OH moiety, and wherein the target-binding domain binds to at least one target molecule located at a first location of the tissue sample; b) ligating a nucleotide to the free 3′-OH moiety of at least one bound probe by contacting the tissue sample with at least one reversible terminator nucleotide and at least one polymerase, thereby extending the at least one bound probe, wherein the at least one reversible terminator nucleotide comprises the nucleotide operably linked to a 3′ terminator moiety via a photocleavable linker; c) illuminating the first location of the tissue sample with light sufficient to cleave the photocleavable linker of the at least one reversible terminator nucleotide, thereby releasing the 3′ terminator moiety and exposing a free 3′-OH moiety on the extended at least one bound probe; and d) repeating steps (b) and (c) until the nucleic acid sequence has been synthesized.

[0074] A schematic of the preceding method is shown in FIG. 2. In FIG. 2, a probe with a free 3′-OH moiety is provided (top, “ISH probe with free 3′-OH). This probe is then extended by ligating a nucleotide to the free 3′-OH moiety by contacting the probe with at least one reversible terminator nucleotide and at least one polymerase. In this non-limiting example, the polymerase is terminal deoxynucleotidyl transferase (TdT). The nucleotide (boxed “N”) is operably linked to a terminator moiety (triangle) by a photocleavable linker (represented by the star shape in FIG. 2). In the next step, de-protection, the photocleavable linker is cleaved by illuminating the probe with light of a wavelength sufficient to cleave the photocleavable linker (in this non-limiting example, the light is UV light with a wavelength of about 365 nm). This releases the terminator moiety (triangle), thereby exposing a free 3′-OH moiety on the extended probe. The process can then be repeated until the desired nucleic acid sequence has been synthesized.

[0075] The present disclosure provides a method of producing a spatially-resolved profile of the abundance of at least two target analytes in a first and an at least second location of a tissue sample comprising: a) contacting the tissue sample with a solution comprising at least two species of probes, the probes comprising a target-binding domain and a target identification domain, wherein each species of probe comprises a unique target-binding domain that binds to one of the at least two target analytes and a unique target identification domain specific for the target analyte, and a free 3′-OH moiety; b) ligating a nucleotide to the free 3′-OH moiety of at least one bound probe by contacting the tissue sample with a first plurality of nucleotide-polymerase complexes, thereby extending the barcode domain of the at least one bound probe and forming a spatial barcode domain, wherein at least one nucleotide-polymerase complex in the first plurality comprises the nucleotide operably linked to a polymerase via a photocleavable linker; c) illuminating at least one location of the tissue sample with light sufficient to cleave the photocleavable linker of the nucleotide-polymerase complexes, thereby releasing the polymerases and exposing a free 3′-OH moiety on the spatial barcode domain at the at least one location of the tissue sample; d) ligating a nucleotide to the free 3′-OH moiety of the spatial barcode domain of at least one bound probe at the at least one location illuminated in step (c) by contacting the tissue sample with an additional plurality of nucleotide-polymerase complexes, thereby extending the spatial barcode domain of the at least one bound probe, wherein at least one nucleotide-polymerase complex in the additional plurality comprises the nucleotide operably linked to a polymerase via a photocleavable linker; e) repeating steps (c) and (d) until the spatial barcode domain of at least one probe bound to a target analyte in the first location of the tissue sample has been extended such that the spatial barcode domain comprises a unique nucleic acid sequence specific to the first location of the tissue sample, and the spatial barcode domain of at least one probe bound to a target analyte in the at least second location of the tissue sample has been extended such that the spatial barcode domain comprises a unique nucleic acid sequence specific to the at least second location of the tissue sample; f) collecting the probes bound to target analytes in the tissue sample; and g) quantifying via sequencing the probes collected in step (f), thereby determining the abundance of the at least two target analytes in the first and the at least second location of the tissue sample, thereby producing a spatially-resolved profile of the abundance of the at least two target analytes.

[0076] A schematic of a non-limiting example of the preceding method is shown in FIGS. 3A-3N. The method begins in FIG. 3A with a sample. In this non-limiting example, the sample comprises four cells, each cell comprising at least one copy of the specific target mRNA to be measured. Cell #1, Cell #2 and Cell #3 comprise one copy of the target mRNA and Cell #3 comprises two copies of the target mRNA.

[0077] The sample can be subdivided into regions of interest (ROI) as shown in FIG. 3B. In this non-limiting example, each ROI comprises one of the cells. Moreover, each ROI is pre-assigned a specific spatial barcode that is unique to that ROI. In this example, each spatial barcode comprises 4 nucleotides, wherein the first nucleotide is any nucleotide (as represented by “N”). The spatial barcode for ROI #1 is NGAT, the spatial barcode for ROI #2 NATG, the spatial barcode for ROI #3 is NATT and the spatial barcode for ROI #4 is NTTA. As described further herein, the spatial barcode can comprise any number of nucleotides, and the four nucleotide spatial barcodes depicted in FIGS. 3A-3N are for exemplary purposes only.

[0078] In a first step of the method, as shown in FIG. 3C, the sample is contacted with a plurality of probes, wherein the probes comprise a unique target-binding domain that binds to the target mRNA, a unique target identification domain specific for the target analyte, and a free 3′-OH moiety, as shown in the top left hand corner of FIG. 3C. The target binding domain is specific for the target mRNA and hybridizes to each target mRNA within each cell. As described further herein, the sample may be contacted with a plurality of probes comprising any number of different species of probes wherein each species of probe comprises a unique target-binding domain that binds to one of the at least two target analytes and a unique target identification domain specific for the target analyte, and a free 3′-OH moiety. FIGS. 3A-3N have a single species for probe for exemplary purposes only.

[0079] In the second step of the method, shown in FIG. 3D, the first nucleotide of the spatial barcode domains is ligated onto the free 3′-OH of each probe bound to a target mRNA by contacting the sample with a plurality of nucleotide-polymerase complexes. In this non-limiting example, the nucleotide polymerase complexes comprise a polymerase, TdT, operably linked to a nucleotide (“N”) via a photocleavable linker (depicted as a four-cornered star-shape).

[0080] In the third step of the method, shown in FIG. 3E, the ROI’s that require the addition of an “A” nucleotide to construct the appropriate spatial barcode are illuminated with light of sufficient wavelength to cleave the photocleavable linker of the nucleotide-polymerase complexes. In this non-limiting example, ROI #2 and ROI #3 require the addition of an “A” nucleotide, so these two ROI’s are illuminated in this step. The illumination is represented by the lighting bolt shape in FIG. 3E and the shading of the illuminated cell. The result of this illumination is that, within the illuminated ROIs, the TdT molecules are liberated from the previously ligated “N” nucleotide, exposing a free 3′-OH moiety that can be ligated to in a subsequent step. FIG. 3F shows the sample after illumination of ROI #2 and ROI #3. The bound probes in ROI #2 and ROI #3 have free 3′-OH moieties as a result of the photocleavage. Conversely, the bound probes in ROI #1 and ROI #4, which do not require the addition of an A nucleotide, do not have free 3′-OH moieties as the TdT molecules are still bound by the intact photocleavable linker to the previously ligated “N” nucleotide.

[0081] The method continues in FIG. 3G, where the sample is contacted with a plurality of nucleotide-polymerase complexes, wherein the nucleotide polymerase complexes comprise a dATP (“A”) operably linked to a TdT molecule via a photocleavable linker (depicted as a four-cornered star shape). These A nucleotides are only ligated to the bound probes in ROI #2 and ROI #3 as these are the only probes that comprise a free 3′-OH moiety that are able to facilitate a ligation reaction. The 3′-termini of the bound probes in ROI #1 and ROI #4 are protected by the still-bound TdT molecules. Thus, an “A” nucleotide is added to the spatial barcodes in ROI #2 and ROI #3, further synthesizing the spatial barcodes in those ROI.

[0082] The method continues in FIG. 3H, where the ROI’s that require the addition of a “T” nucleotide to construct the appropriate spatial barcode are illuminated with light of sufficient wavelength to cleave the photocleavable linker of the nucleotide-polymerase complexes. In this non-limiting example, ROI #2, ROI #3 and ROI #4 require the addition of a “T” nucleotide in the next step, so these three ROI’s are illuminated. The result of this illumination is that, within the illuminated ROIs, the TdT molecules are liberated from the previously ligated nucleotide, exposing a free 3′-OH moiety that can be ligated to in a subsequent step. FIG. 3I shows the sample after illumination of ROI #2, ROI #3 and ROI #4. The bound probes in ROI #2, ROI #3 and ROI #4 have free 3′-OH moieties as a result of the photocleavage. Conversely, the bound probes in ROI #1, which do not require the addition of an T nucleotide, do not have free 3′-OH moieties as the TdT molecules are still bound by the intact photocleavable linker to the previously ligated nucleotide.

[0083] The method continues in FIG. 3J, where the sample is contacted with a plurality of nucleotide-polymerase complexes, wherein the nucleotide polymerase complexes comprise a dTTP (“T”) operably linked to a TdT molecule via a photocleavable linker (depicted as a four-cornered star shape). These T nucleotides are only ligated to the bound probes in ROI #2, ROI #3 and ROI #4 as these are the only probes that comprise a free 3′-OH moiety that are able to facilitate a ligation reaction. The 3′-termini of the bound probes in ROI #1 are protected by the still-bound TdT molecules. Thus, an “T” nucleotide is added to the spatial barcodes in ROI #2, ROI #3 and ROI #4, further synthesizing the spatial barcodes in those ROI.

[0084] The method continues in FIG. 3K, where the ROI’s that require the addition of a “G” nucleotide to construct the appropriate spatial barcode are illuminated with light of sufficient wavelength to cleave the photocleavable linker of the nucleotide-polymerase complexes. In this non-limiting example, ROI #1 and ROI #2 require the addition of a “G” nucleotide in the next step, so these two ROI’s are illuminated. The result of this illumination is that, within the illuminated ROIs, the TdT molecules are liberated from the previously ligated nucleotide, exposing a free 3′-OH moiety that can be ligated to in a subsequent step. FIG. 3L shows the sample after illumination of ROI #1 and ROI #2. The bound probes in ROI #1 and ROI #2 have free 3′-OH moieties as a result of the photocleavage. Conversely, the bound probes in ROI #3 and ROI #4, which do not require the addition of an T nucleotide, do not have free 3′-OH moieties as the TdT molecules are still bound by the intact photocleavable linker to the previously ligated nucleotide.

[0085] The method continues in FIG. 3M, where the sample is contacted with a plurality of nucleotide-polymerase complexes, wherein the nucleotide polymerase complexes comprise a dGTP (“G”) operably linked to a TdT molecule via a photocleavable linker (depicted as a four-cornered star shape). These G nucleotides are only ligated to the bound probes in ROI #1 and ROI #2 as these are the only probes that comprise a free 3′-OH moiety that are able to facilitate a ligation reaction. The 3′-termini of the bound probes in ROI #3 and ROI #4 are protected by the still-bound TdT molecules. Thus, an “G” nucleotide is added to the spatial barcodes in ROI #2, ROI #3 and ROI #4, further synthesizing the spatial barcodes in those ROI. After this ligation, the bound probe in ROI #2 has a completely synthesized spatial barcode of “NATG”.

[0086] The above-described steps can be repeated any number of times with any of the four nucleotides (dATP, dGTP, dTTP and dCTP) until all of the bound probes in each ROI have complete spatial barcodes, as shown in FIG. 3N. After the completion of all of the spatial barcodes in each ROI, the bound probes can be washed from the sample, collected, and then sequenced. By sequencing the spatial barcode for each collected probe, the ROI from which that specific probe originated can be identified, allowing for the quantification of the abundance of each target mRNA within each ROI, thereby producing a spatially-resolved profile of the abundance of the target mRNA.

[0087] The order of nucleotide addition (i.e. A, then T then G) in FIGS. 3A-3N are for exemplary purposes only. In methods of the present disclosure, nucleotides can be added to the spatial barcodes in any order and/or combination to synthesize the appropriate spatial barcodes for each ROI.

[0088] In some aspects of the methods of the present disclosure, a nucleotide-polymerase complex comprises a nucleotide operably linked to a polymerase via a photocleavable linker

[0089] In some aspects, a photocleavable linker can comprise an amine-to-thiol crosslinker. In some aspects, an amine-to-thiol crosslinker can comprise PEG₄-SPDP (2-pyridyldithiol-tetraoxatetradecase-N-hydroxysuccinimide). In some aspects, a photocleavable linker can comprise a maleimide-NHS carbonate crosslinker such as BP-23354. FIG. 7 shows the structure of BP-23354.

[0090] In some aspects of the methods of the present disclosure, a nucleotide-polymerase complex can comprise a nucleotide-polymerase complex described in Palluk et al. Nature Biotechnology, 2018, Vol. 36, No. 7, pgs. 645-650, the contents of which are incorporated herein by reference in their entirety.

[0091] In some aspects, the nucleotide in a nucleotide-polymerase complex can comprise a nucleotide analogue. In some aspects, a nucleotide analogue can be a proparglyamino dNTP. In some aspects, a nucleotide analogue can be 7-deaza-7-proparglyamino-dATP, 5-proparglyamino-dCTP, 7-deaza-7-proparglyamino-dGRP or 5-proparglyamino-dUTP. FIG. 6 shows the structures of these various proparglyamino dNTPs.

[0092] In some aspects, a nucleotide-polymerase complex can be prepared by reacting a proparglyamino dNTP with an amine-to-thiol crosslinker, such as, but not limited to, BP-23354, to form a photocleavable linker-nucleotide “linker-dNTP”. The maleimide moiety of the linker-dNTP can then be reacted with a polymerase, such as, but not limited to, TdT, containing a single exposed cysteine residue to form the nucleotide-polymerase complex. FIG. 8 is a schematic of an exemplary nucleotide-polymerase complex preparation method. In FIG. 8, 5-proparglyamino-dCTP is first reacted with BP-23354 to form “linker-dCTP”. The linker-dCTP is then reacted with a TdT polymerase that comprises a single exposed cysteine to form “TdT-dCTP”. In this example, dCTP can be substituted with any other proparglyamino dNTP, including, but not limited to 7-deaza-7-proparglyamino-dATP, 7-deaza-7-proparglyamino-dGRP or 5-proparglyamino-dUTP.

[0093] In some aspects, the polymerase in a nucleotide polymerase complex can be terminal deoxynucleotidyl transferase (TdT) or a biologically-active portion thereof. In some aspects, the TdT can be Mus musculus TdT. In some aspects, the TdT can be the short isoform of Mus musculus TdT, which has the amino acid sequence:

MDPLQAVHLGPRKKRPRQLGTPVASTPYDIRFRDLVLFILEKKMGTTRRA
FLMELARRKGFRVENELSDSVTHIVAENNSGSDVLEWLQLQNIKASSELE
LLDISWLIECMGAGKPVEMMGRHQLVVNRNSSPSPVPGSQNVPAPAVKKI
SQYACQRRTTLNNYNQLFTDALDILAENDELRENEGSCLAFMRASSVLKS
LPFPITSMKDTEGIPCLGDKVKSIIEGIIEDGESSEAKAVLNDERYKSFK
LFTSVFGVGLKTAEKWFRMGFRTLSKIQSDKSLRFTQMQKAGFLYYEDLV
SCVNRPEAEAVSMLVKEAVVTFLPDALVTMTGGFRRGKMTGHDVDFLITS
PEATEDEEQQLLHKVTDFWKQQGLLLYCDILESTFEKFKQPSRKVDALDH
FQKCFLILKLDHGRVHSEKSGQQEGKGWKAIRVDLVMCPYDRRAFALLGW
TGSRQFERDLRRYATHERKMMLDNHALYDRTKRVFLEAESEEEIFAHLGL
DYIEPWERNA (SEQ ID NO: 1)

[0094] In some aspects, the polymerase in a nucleotide polymerase complex can comprise residues 132-510 of the short isoform of Mus musculus TdT. The amino acid sequence of residues 132-510 of the short isoform Mus musculus TdT is:

SPSPVPGSQNVPAPAVKKISQYACQRRTTLNNYNQLFTDALDILAENDEL
RENEGSCLAFMRASSVLKSLPFPITSMKDTEGIPCLGDKVKSIIEGIIED
GESSEAKAVLNDERYKSFKLFTSVFGVGLKTAEKWFRMGFRTLSKIQSDK
SLRFTQMQKAGFLYYEDLVSCVNRPEAEAVSMLVKEAVVTFLPDALVTMT
GGFRRGKMTGHDVDFLITSPEATEDEEQQLLHKVTDFWKQQGLLLYCDIL
ESTFEKFKQPSRKVDALDHFQKCFLILKLDRGRVHSEKSGQQEGKGWKAI
RVDLVMCPYDRRAFALLGWTGSRQFERDLRRYATHERKMMLDNHALYDRT
KRVFLEAESEEEIFAHLGLDYIEPWERNA (SEQ ID NO: 2)

[0095] In some aspects, the polymerase in a nucleotide polymerase complex can comprise residues 132-510 of the short isoform of Mus musculus TdT, wherein all exposed native cysteine residues have been removed, such that the cysteine at position 188 is substituted by Alanine, the cysteine at position 216 is substituted by Serine, the cysteine at position 302 is substituted by Alanine, the cysteine at position 378 is substituted by Alanine and the cysteine at position 438 is substituted by Serine. This sequence, herein referred to as “exposed Cys-less 132-510 Mus musculus TdT” has the amino acid sequence:

SPSPVPGSQNVPAPAVKKISQYACQRRTTLNNYNQLFTDALDILAENDEL
RENEGSALAFMRASSVLKSLPFPITSMKDTEGIPSLGDKVKSIIEGIIED
GESSEAKAVLNDERYKSFKLFTSVFGVGLKTAEKWFRMGFRTLSKIQSDK
SLRFTQMQKAGFLYYEDLVSAVNRPEAEAVSMLVKEAVVTFLPDALVTMT
GGFRRGKMTGHDVDFLITSPEATEDEEQQLLHKVTDFWKQQGLLLYADIL
ESTFEKFKQPSRKVDALDHFQKCFLILKLDHGRVHSEKSGQQEGKGWKAI
RVDLVMSPYDRRAFALLGWTGSRQFERDLRRYATHERKMMLDNHALYDRT
KRVFLEAESEEEIFAHLGLDYIEPWERNA (SEQ ID NO: 3)

[0096] In some aspects, the polymerase in a nucleotide polymerase complex can comprise the sequence of exposed Cys-less 132-510 Mus musculus TdT, wherein the Glutamic Acid at position 180 is replaced with a cysteine residue. This sequence, herein referred to as MmTdT180 has the amino acid sequence:

SPSPVPGSQNVPAPAVKKISQYACQRRTTLNNYNQLFTDALDILAENDCL
RENEGSALAFMRASSVLKSLPFPITSMKDTEGIPSLGDKVKSIIEGIIED
GESSEAKAVLNDERYKSFKLFTSVFGVGLKTAEKWFRMGFRTLSKIQSDK
SLRFTQMQKAGFLYYEDLVSAVNRPEAEAVSMLVKEAVVTFLPDALVTMT
GGFRRGKMTGHDVDFLITSPEATEDEEQQLLHKVTDFWKQQGLLLYADIL
ESTFEKFKQPSRKVDALDHFQKCFLILKLDHGRVHSEKSGQQEGKGWKAI
RVDLVMSPYDRRAFALLGWTGSRQFERDLRRYATHERKMMLDNHALYDRT
KRVFLEAESEEEIFAHLGLDYIEPWERNA (SEQ ID NO: 4)

[0097] In some aspects, the polymerase in a nucleotide polymerase complex can comprise the sequence of exposed Cys-less 132-510 Mus musculus TdT, wherein the Alanine at position 188 is replaced with a cysteine residue. This sequence, herein referred to as MmTdT188 has the amino acid sequence:

SPSPVPGSQNVPAPAVKKISQYACQRRTTLNNYNQLFTDALDILAENDEL
RENEGSCLAFMRASSVLKSLPFPITSMKDTEGIPSLGDKVKSIIEGIIED
GESSEAKAVLNDERYKSFKLFTSVFGVGLKTAEKWFRMGFRTLSKIQSDK
SLRFTQMQKAGFLYYEDLVSAVNRPEAEAVSMLVKEAVVTFLPDALVTMT
GGFRRGKMTGHDVDFLITSPEATEDEEQQLLHKVTDFWKQQGLLLYADIL
ESTFEKFKQPSRKVDALDHFQKCFLILKLDHGRVHSEKSGQQEGKGWKAI
RVDLVMSPYDRRAFALLGWTGSRQFERDLRRYATHERKMMLDNHALYDRT
KRVFLEAESEEEIFAHLGLDYIEPWERNA (SEQ ID NO: 5)

[0098] In some aspects, the polymerase in a nucleotide polymerase complex can comprise the sequence of exposed Cys-less 132-510 Mus musculus TdT, wherein the Threonine at position 253 is replaced with a cysteine residue. This sequence, herein referred to as MmTdT253 has the amino acid sequence:

SPSPVPGSQNVPAPAVKKISQYACQRRTTLNNYNQLFTDALDILAENDEL
RENEGSALAFMRASSVLKSLPFPITSMKDTEGIPSLGDKVKSIIEGIIED
GESSEAKAVLNDERYKSFKLFCSVFGVGLKTAEKWFRMGFRTLSKIQSDK
SLRFTQMQKAGFLYYEDLVSAVNRPEAEAVSMLVKEAVVTFLPDALVTMT
GGFRRGKMTGHDVDFLITSPEATEDEEQQLLHKVTDFWKQQGLLLYADIL
ESTFEKFKQPSRKVDALDHFQKCFLILKLDHGRVHSEKSGQQEGKGWKAI
RVDLVMSPYDRRAFALLGWTGSRQFERDLRRYATHERKMMLDNHALYDRT
KRVFLEAESEEEIFAHLGLDYIEPWERNA (SEQ ID NO: 6)

[0099] In some aspects, the polymerase in a nucleotide polymerase complex can comprise the sequence of exposed Cys-less 132-510 Mus musculus TdT, wherein the Alanine at position 302 is replaced with a cysteine residue. This sequence, herein referred to as MmTdT253 has the amino acid sequence:

SPSPVPGSQNVPAPAVKKISQYACQRRTTLNNYNQLFTDALDILAENDEL
RENEGSALAFMRASSVLKSLPFPITSMKDTEGIPSLGDKVKSIIEGIIED
GESSEAKAVLNDERYKSFKLFTSVFGVGLKTAEKWFRMGFRTLSKIQSDK
SLRFTQMQKAGFLYYEDLVSCVNRPEAEAVSMLVKEAVVTFLPDALVTMT
GGFRRGKMTGHDVDFLITSPEATEDEEQQLLHKVTDFWKQQGLLLYADIL
ESTFEKFKQPSRKVDALDHFQKCFLILKLDHGRVHSEKSGQQEGKGWKAI
RVDLVMSPYDRRAFALLGWTGSRQFERDLRRYATHERKMMLDNHALYDRT
KRVFLEAESEEEIFAHLGLDYIEPWERNA (SEQ ID NO: 7)

[0100] In some aspects, the polymerase in a nucleotide polymerase complex can be a Maltose Binding Protein (MBP)-fusion protein. In some aspects, MBP can be fused to the N-terminus of the polymerase with an amino acid linker of any length between the MBP and the start of the polymerase.

[0101] The present disclosure provides a method of producing a spatially-resolved profile of the abundance of at least two target analytes in a first and an at least second location of a tissue sample comprising: a) contacting the tissue sample with a solution comprising at least two species of probes, the probes comprising a target-binding domain and a target identification domain, wherein each species of probe comprises a unique target-binding domain that binds to one of the at least two target analytes and a unique target identification domain specific for the target analyte, and a free 3′-OH moiety; b) ligating a nucleotide to the free 3′-OH moiety of the barcode domain of at least one bound probe by contacting the tissue sample with a first plurality of reversible terminator nucleotides and a first plurality of polymerases, thereby extending the at least one bound probe and forming a spatial barcode domain, wherein at least one reversible terminator nucleotide in the first plurality comprises the nucleotide operably linked to a 3′ terminator moiety via a photocleavable linker; c) illuminating at least one location of the tissue sample with light sufficient to cleave the photocleavable linker of the reversible terminator nucleotides, thereby releasing the reversible 3′ terminator moieties and exposing a free 3′-OH moiety on the spatial barcode domain at the at least one location of the tissue sample; d) ligating a nucleotide to the free 3′-OH moiety of the spatial barcode domain of at least one bound probe at the at least one location illuminated in step (c) by contacting the tissue sample with an additional plurality of reversible terminator nucleotides and an additional plurality of polymerases, thereby extending the spatial barcode domain of the at least one bound probe, wherein at least one reversible terminator nucleotide in the additional plurality comprises the nucleotide operably linked to a reversible 3′ terminator moiety via a photocleavable linker; e) repeating steps (c) and (d) until the spatial barcode domain of at least one probe bound to a target analyte in the first location of the tissue sample has been extended such that the spatial barcode domain comprises a unique nucleic acid sequence specific to the first location of the tissue sample, the spatial barcode domain of at least one probe bound to a target analyte in the at least second location of the tissue sample has been extended such that the spatial barcode domain comprises a unique nucleic acid sequence specific to the at least second location of the tissue sample; f) collecting the probes bound to target analytes in the tissue sample; and g) quantifying via sequencing the probes collected in step (f), thereby determining the abundance of the at least two target analytes in the first and the at least second location of the tissue sample, thereby producing a spatially-resolved profile of the abundance of the at least two target analytes.

[0102] A schematic of a non-limiting example of the preceding method is shown in FIGS. 4A-4N. The method begins in FIG. 4A with a sample. In this non-limiting example, the sample comprises four cells, each cell comprising at least one copy of the specific target mRNA to be measured. Cell #1, Cell #2 and Cell #3 comprise one copy of the target mRNA and Cell #3 comprises two copies of the target mRNA.

[0103] The sample can be subdivided into regions of interest (ROI) as shown in FIG. 4B. In this non-limiting example, each ROI comprises one of the cells. Moreover, each ROI is pre-assigned a specific spatial barcode that is unique to that ROI. In this example, each spatial barcode comprises 4 nucleotides, wherein the first nucleotide is any nucleotide (as represented by “N”). The spatial barcode for ROI #1 is NGAT, the spatial barcode for ROI #2 NATG, the spatial barcode for ROI #3 is NATT and the spatial barcode for ROI #4 is NTTA. As described further herein, the spatial barcode can comprise any number of nucleotides, and the four nucleotide spatial barcodes depicted in FIGS. 4A-4N are for exemplary purposes only.

[0104] In a first step of the method, as shown in FIG. 4C, the sample is contacted with a plurality of probes, wherein the probes comprise a unique target-binding domain that binds to the target mRNA, a unique target identification domain specific for the target analyte, and a free 3′-OH moiety, as shown in the top left hand corner of FIG. 4C. The target binding domain is specific for the target mRNA and hybridizes to each target mRNA within each cell. As described further herein, the sample may be contacted with a plurality of probes comprising any number of different species of probes wherein each species of probe comprises a unique target-binding domain that binds to one of the at least two target analytes and a unique target identification domain specific for the target analyte, and a free 3′-OH moiety. FIGS. 4A-4N have a single species for probe for exemplary purposes only.

[0105] In the second step of the method, shown in FIG. 4D, the first nucleotide of the spatial barcode domains is ligated onto the free 3′-OH of each probe bound to a target mRNA by contacting the sample with a plurality of reversible terminator nucleotides and a plurality of polymerases. In this non-limiting example, the reversible terminator nucleotides comprise a nucleotide (dNTP, “N”) operably linked to a terminator moiety (depicted as a triangle) via a photocleavable linker (depicted as a four-cornered star-shape). In this non-limiting example, the polymerase is TdT. After incubation with the reversible terminator nucleotides and polymerases, each bound probe has been extended by one nucleotide, “N”, as shown in FIG. 4E.

[0106] In the next step of the method, shown in FIG. 4F, the ROI’s that require the addition of an “A” nucleotide to construct the appropriate spatial barcode are illuminated with light of sufficient wavelength to cleave the photocleavable linker of the reversible terminator nucleotides complexes. In this non-limiting example, ROI #2 and ROI #3 require the addition of an “A” nucleotide, so these two ROI’s are illuminated in this step. The illumination is represented by the lightning bolt shape in FIG. 4F and the shading of the illuminated cell. The result of this illumination is that, within the illuminated ROIs, the terminator moieties are liberated from the previously ligated “N” nucleotide, exposing a free 3′-OH moiety that can be ligated to in a subsequent step. FIG. 4G shows the sample after illumination of ROI #2 and ROI #3. The bound probes in ROI #2 and ROI #3 have free 3′-OH moieties as a result of the photocleavage. Conversely, the bound probes in ROI #1 and ROI #4, which do not require the addition of an A nucleotide, do not have free 3′-OH moieties as the terminator moieties are still bound by the intact photocleavable linker to the previously ligated “N” nucleotide.

[0107] The method continues in FIG. 4H, where the sample is contacted with plurality of reversible terminator nucleotides and a plurality of polymerases. The reversible terminator nucleotides comprise a dATP (“A”) operably linked to a terminator moiety (depicted as a triangle) via a photocleavable linker (depicted as a four-cornered star shape). These A nucleotides are only ligated to the bound probes in ROI #2 and ROI #3 as these are the only probes that comprise a free 3′-OH moiety that are able to facilitate a ligation reaction. The 3′-termini of the bound probes in ROI #1 and ROI #4 are protected by the still-bound terminator moieties. As shown in FIG. 4I, an “A” nucleotide is added to the spatial barcodes in ROI #2 and ROI #3, further synthesizing the spatial barcodes in those ROI.

[0108] The method continues in FIG. 4J, where the ROI’s that require the addition of a “T” nucleotide to construct the appropriate spatial barcode are illuminated with light of sufficient wavelength to cleave the photocleavable linker of the reversible terminator nucleotides. In this non-limiting example, ROI #2, ROI #3 and ROI #4 require the addition of a “T” nucleotide in the next step, so these three ROI’s are illuminated. The result of this illumination is that, within the illuminated ROIs, the terminator moieties are liberated from the previously ligated nucleotide, exposing a free 3′-OH moiety that can be ligated to in a subsequent step. FIG. 4K shows the sample after illumination of ROI #2, ROI #3 and ROI #4. The bound probes in ROI #2, ROI #3 and ROI #4 have free 3′-OH moieties as a result of the photocleavage. Conversely, the bound probes in ROI #1, which do not require the addition of an T nucleotide, do not have free 3′-OH moieties as the terminator moieties are still bound by the intact photocleavable linker to the previously ligated nucleotide.

[0109] The method continues in FIG. 4L, where the sample is contacted with plurality of reversible terminator nucleotides and a plurality of polymerases. The reversible terminator nucleotides comprise a dTTP (“T”) operably linked to a terminator moiety (depicted as a triangle) via a photocleavable linker (depicted as a four-cornered star shape). These T nucleotides are only ligated to the bound probes in ROI #2, ROI #3 and ROI #4 as these are the only probes that comprise a free 3′-OH moiety that are able to facilitate a ligation reaction. The 3′-termini of the bound probes in ROI #1 are protected by the still-bound terminator moieties. As shown in FIG. 4M, a “T” nucleotide is added to the spatial barcodes in ROI #2, ROI #3 and ROI #4, further synthesizing the spatial barcodes in those ROI.

[0110] The above-described steps can be repeated any number of times with any of the four nucleotides (dATP, dGTP, dTTP and dCTP) until all of the bound probes in each ROI have complete spatial barcodes, as shown in FIG. 4N. After the completion of all of the spatial barcodes in each ROI, the bound probes can be washed from the sample, collected, and then sequenced. By sequencing the spatial barcode for each collected probe, the ROI from which that specific probe originated can be identified, allowing for the quantification of the abundance of each target mRNA within each ROI, thereby producing a spatially-resolved profile of the abundance of the target mRNA.

[0111] The order of nucleotide addition (i.e. A, then T then G) in FIGS. 4A-4N are for exemplary purposes only. In methods of the present disclosure, nucleotides can be added to the spatial barcodes in any order and/or combination to synthesize the appropriate spatial barcodes for each ROI.

[0112] In some aspects of the methods of the present disclosure, a 3′ terminator moiety can comprise 2-nitrobenzyl.

[0113] In some aspects of the methods of the present disclosure, a reversible terminator nucleotide can comprise 3′-O-(2-nitrobenzyl)-dATP, 3′-O-(2-nitrobenzyl)-dCTP, 3′-O-(2-nitrobenzyl)-dGTP or 3′-O-(2-nitrobenzyl)-d TTP. The structures of these reversible terminator nucleotide are shown in FIG. 9.

[0114] In some aspects of the methods of the present disclosure, a reversible terminator nucleotide can comprise any of the modified nucleotides described in Wu et al. PNAS, 2007, Vol. 104, No. 42, pgs. 16462-16467, the contents of which is incorporated by reference in their entirety.

[0115] In some aspects, the methods of the present disclosure can be used to produce a spatially-resolved profile of the abundance of any number of target analytes in at least about 10, or at least about 100, or at least about 1,000, or at least about 10,000, or at least about 100,000, or at least about 1,000,000, or at least about 10⁷, or at least about 10⁸, or at least about 10⁹, or at least about 10¹⁰, or at least about 10¹¹, or at least about 10¹², or at least about 10¹³, or at least about 10¹⁴, or at least about 10¹⁵, or more locations in a tissue sample.

[0116] In some aspects, the methods of the present disclosure can be used to produce a spatially-resolved profile of the abundance of at least about three, or at least about four, or at least about five, or at least about six, or at least about seven, or at least about eight, or at least about nine, or at least about ten, or at least about 20, or at least about 30, or at least about 40, or at least about 50, or at least about 60, or at least about 70, or at least about 80, or at least about 90, or at least about 100, or at least about 250, or at least about 500, or at least about 750, or at least about 1000, or at least about 5000, or at least about 10,000, or at least about 100,000 target analytes in any number of locations in a tissue sample.

[0117] In some aspects of the methods of the present disclosure, contacting a tissue sample with a solution comprising at least two species of probes can comprise contacting a tissue sample with at least about three, or at least about four, or at least about five, or at least about six, or at least about seven, or at least about eight, or at least about nine, or at least about ten, or at least about 20, or at least about 30, or at least about 40, or at least about 50, or at least about 60, or at least about 70, or at least about 80, or at least about 90, or at least about 100, or at least about 250, or at least about 500, or at least about 750, or at least about 1000, or at least about 5000, or at least about 10,000, or at least about 100,000 species of probes, the probes comprising a target-binding domain and a target identification domain, wherein each species of probe comprises a unique target-binding domain that binds to one of the at least two target analytes and a unique target identification domain specific for the target analyte, and a free 3′-OH moiety.

[0118] As used herein, the term “spatially detecting” is used in its broadest sense to refer to the identification of the presence of a specific target analyte within a specific region of interest in a sample. Spatially detecting can comprise quantifying the amount of a specific target analyte present within a specific region of interest in a sample. Spatially detecting can further comprise quantifying the relative amount of a first target analyte within a specific region of interest in a sample as compared to the amount of at least a second target analyte within a specific region of interest in a sample. Spatially detecting can also comprise quantifying the relative amount of a specific target analyte within a first region of interest in a sample compared to the amount of the same target analyte in at least a second region of interest in the same sample or different sample.

### Target Analyte

[0119] In some aspects of the methods and compositions of the present disclosure, a target analyte can be any molecule within a sample that is to be spatially detected. Target analytes include, but are not limited to, nucleic acid molecules and protein molecules. When the target analyte is a protein, the protein can be referred to as a target protein. When the target analyte is a nucleic acid, the nucleic acid can be referred to as a target nucleic acid. Target nucleic acids can include, but are not limited to, mRNA molecules, micro RNA (miRNA) molecules, tRNA molecules, rRNA molecules, gDNA or any other nucleic acid present within a sample.

[0120] In some aspects of the methods of the present disclosure, a target analyte is a target nucleic acid. A target nucleic acid can be DNA or RNA. A target nucleic acid can be a messenger RNA (mRNA). A target nucleic acid can be a microRNA (miRNA).

### Probes

[0121] In some aspects of the methods of the present disclosure, a probe can be a polynucleotide. In some aspects, a probe can comprise DNA, RNA or a combination of DNA and RNA. In some aspects, a probe can comprise DNA. In some aspects, a probe can be a single-stranded polynucleotide. In some aspects, a probe can be a double-stranded polynucleotide. In some aspects, a probe can be a partially single-stranded polynucleotide. In some aspects, a probe can be a partially double-stranded polynucleotide.

[0122] In some aspects, a probe can comprise a combination of nucleic acids and amino acids. In a non-limiting example, a probe can comprise an antibody operably linked to a polynucleotide, wherein the polynucleotide comprises DNA, RNA or a combination of DNA and RNA.

[0123] In some aspects of the methods of the present disclosure, a probe can comprise a target-binding domain.

[0124] The target binding domain can comprise a series of nucleotides (e.g. is a polynucleotide). The target binding domain can comprise DNA, RNA, or a combination thereof. In some aspects, the target binding domain comprises DNA. In some aspects, the target-binding domain is a single-stranded polynucleotide.

[0125] In aspects wherein the target binding domain is a polynucleotide, the target binding domain can bind directly or indirectly to a target nucleic acid. A target binding domain can bind directly to a target nucleic acid by hybridizing to a portion of the target nucleic acid that is complementary to the target binding domain of the sequencing probe.

[0126] In some aspects of the methods of the present disclosure, that target-binding domain of a probe can indirectly hybridize to a target nucleic acid present in a sample (via an intermediary oligonucleotide).

[0127] The target binding domain of the sequencing probe can be designed to control the likelihood of sequencing probe hybridization and/or de-hybridization and the rates at which these occur. Generally, the lower a probe’s Tm, the faster and more likely that the probe will de-hybridize to/from a target nucleic acid. Thus, use of lower Tm probes will decrease the number of probes bound to a target nucleic acid.

[0128] The length of a target binding domain, in part, affects the likelihood of a probe hybridizing and remaining hybridized to a target nucleic acid. Generally, the longer (greater number of nucleotides) a target binding domain is, the less likely that a complementary sequence will be present in the target nucleotide. Conversely, the shorter a target binding domain is, the more likely that a complementary sequence will be present in the target nucleotide.

[0129] A target binding domain can be any number of nucleotides in length. In some aspects, a target binding domain can be at least about two, or at least about three, or at least about four, or at least about five, or at least about six, or at least about seven, or at least about eight, or at least about nine, or at least about ten, or at least about 11, or at least about 12, or at least about 13, or at least about 14, or at least about 15, or at least about 16, or at least about 17, or at least about 18, or at least about 19, or at least about 20, or at least about 21, or at least about 22, or at least about 23, or at least about 24, or at least about 25, or at least about 26, or at least about 27, or at least about 28, or at least about 29, or at least about 30, or at least about 31, or at least about 32, or at least about 33, or at least about 34, or at least about 35, or at least about 36, or at least about 37, or at least about 38, or at least about 39, or at least about 40, or at least about 41, or at least about 42, or at least about 43, or at least about 44, or at least about 45, or at least about 46, or at least about 47, or at least about 48, or at least about 49, or at least about 50 or more nucleotides in length.

[0130] Probes of the present disclosure can be used for spatially detecting a target nucleic acid. In this aspect, the target binding domain can be a target nucleic acid-binding region. The target nucleic acid-binding region is preferably at least 15 nucleotides in length, and more preferably is at least 20 nucleotides in length. In specific aspects, the target nucleic acid-binding region is approximately 10 to 500, 20 to 400, 25, 30 to 300, 35, 40 to 200, or 50 to 100 nucleotides in length. Probes and methods for binding and identifying a target nucleic acid have been described in, e.g., US2003/0013091, US2007/0166708, US2010/0015607, US2010/0261026, US2010/0262374, US2010/0112710, US2010/0047924, and US2014/0371088, each of which is incorporated herein by reference in its entirety.

[0131] The target binding domain can comprise at least one natural base. The target binding domain can comprise no natural bases. The target binding domain can comprise at least one modified nucleotide or nucleic acid analog. The target binding domain can comprise no modified nucleotides or nucleic acid analogs. The target binding domain can comprise at least one universal base. The target binding domain can comprise no universal bases. The target binding domain can comprise at least one degenerate base. The target binding domain can comprise no degenerate bases.

[0132] The target binding domain can comprise any combination natural bases (e.g. 0, 1, 2, 3, 4, 5, 6, 7, 8, 9, 10, or more natural bases), modified nucleotides or nucleic acid analogs (e.g. 0, 1, 2, 3, 4, 5, 6, 7, 8, 9, 10, or more modified nucleotides or nucleic acid analogs), universal bases (e.g. 0, 1, 2, 3, 4, 5, 6, 7, 8, 9, 10, or more universal bases), or degenerate bases (e.g. 0, 1, 2, 3, 4, 5, 6, 7, 8, 9, 10, or more degenerative bases). When present in a combination, the natural bases, modified nucleotides or nucleic acid analogs, universal bases and degenerate bases of a particular target binding domain can be arranged in any order.

[0133] The terms “modified nucleotides” or “nucleic acid analogues” include, but are not limited to, locked nucleic acids (LNA), bridged nucleic acids (BNA), propyne-modified nucleic acids, zip nucleic acids (ZNA®), isoguanine, isocytosine 6-amino-1-(4-hydroxy-5-hydroxy methyl-tetrahydro-furan-2-yl)-1,5-dihydro-pyrazolo[3,4-d]pyrimidin-4-one (PPG) and 2′-modified nucleic acids such as 2′-O-methyl nucleic acids. The target binding domain can include zero to six (e.g. 0, 1, 2, 3, 4, 5 or 6) modified nucleotides or nucleic acid analogues. Preferably, the modified nucleotides or nucleic acid analogues are locked nucleic acids (LNAs).

[0134] The term “locked nucleic acids (LNA)” as used herein includes, but is not limited to, a modified RNA nucleotide in which the ribose moiety comprises a methylene bridge connecting the 2′ oxygen and the 4′ carbon. This methylene bridge locks the ribose in the 3′-endo confirmation, also known as the north confirmation, that is found in A-form RNA duplexes. The term inaccessible RNA can be used interchangeably with LNA. The term “bridged nucleic acids (BNA)” as used herein includes, but is not limited to, modified RNA molecules that comprise a five-membered or six-membered bridged structure with a fixed 3′-endo confirmation, also known as the north confirmation. The bridged structure connects the 2′ oxygen of the ribose to the 4′ carbon of the ribose. Various different bridge structures are possible containing carbon, nitrogen, and hydrogen atoms. The term “propyne-modified nucleic acids” as used herein includes, but is not limited to, pyrimidines, namely cytosine and thymine/uracil, that comprise a propyne modification at the C5 position of the nucleic acid base. The term “zip nucleic acids (ZNA®)” as used herein includes, but is not limited to, oligonucleotides that are conjugated with cationic spermine moieties.

[0135] The term “universal base” as used herein includes, but is not limited to, a nucleotide base does not follow Watson-Crick base pair rules but rather can bind to any of the four canonical bases (A, T/U, C, G) located on the target nucleic acid. The term “degenerate base” as used herein includes, but is not limited to, a nucleotide base that does not follow Watson-Crick base pair rules but rather can bind to at least two of the four canonical bases A, T/U, C, G), but not all four. A degenerate base can also be termed a Wobble base; these terms are used interchangeably herein.

[0136] In some aspects, the term “degenerate base” can also be used to refer to a specific position on a nucleic acid molecule (e.g. an amplification primer, a probe, etc.) that, in the context of a plurality of the nucleic acid molecules, can independently be one or more different nucleotides on different nucleic acid molecules within said plurality. In a non-limiting example, a plurality of 4-nucleotide long nucleic acid molecules may have a degenerate base at the fourth nucleotide position, wherein the degenerate base can be either A, C or G, and wherein the nucleotides at positions 1, 2 and 3 are the same between different nucleic acid molecules. That is, within said plurality, there may be nucleic acid molecules with A at the fourth position, nucleic acid molecules with C at the fourth position, and nucleic acid molecules with G at the fourth position, while the all of the nucleic acid molecules are identical at positions 1, 2 and 3.

[0137] In some aspect wherein the target analyte is a target protein, a target binding domain can be a protein-target binding domain. In some aspects, a protein-target binding domain can comprise an antibody or an antibody fragment that binds to the target protein. In some aspects, an antibody or an antigen-binding fragment thereof comprises a Fv, a Fab, a Fab′, a Fab′-SH, a F(ab′)2, a nanobody, a diabody, a linear antibody, a single-chain antibody molecule, an scFV or a multispecific antibody. In some aspects, a protein-target binding domain can comprise an aptamer that binds to the target protein. In some aspects, a protein-target binding domain can comprise any molecule that is able to specifically bind to a target protein in a biological sample.

[0138] In some aspects of the methods of the present disclosure, a probe can comprise a target identification domain.

[0139] A target identification domain is a nucleic acid molecule that identifies the target analyte bound to the target binding domain of a probe. The target identification domain comprises a unique nucleic acid sequence that identifies the target analyte bound to the target binding domain of the probe. In a non-limiting example, a probe with a target binding domain that binds to the protein P53 comprises a target identification domain with a unique nucleic acid sequence that corresponds to P53, while a probe with a target binding domain that binds to the protein P97 comprises a target identification domain with a unique nucleic acid sequence that corresponds to P97.

[0140] A target identification domain can be any number of nucleotides in length. In some aspects, a target identification domain can be at least about 12 nucleotides in length. In some aspects, a target identification domain be at least about 7 to at least about 17 nucleotides in length. In some aspects, a target identification domain be at least about 2 to at least about 22 nucleotides in length. In some aspects, a target identification domain can be at least about 2, or at least about 3, or at least about 4, or at least about 5, or at least about 6, or at least about 7, or at least about 8, or at least about 9, or at least about 10, or at least about 11, or at least about 12, or at least about 13, or at least about 14, or at least about 15, or at least about 16, or at least about 17, or at least about 18, or at least about 19, or at least about 20, or at least about 21, or at least about 22, or at least about 23, or at least about 24, or at least about 25, or at least about 26, or at least about 27, or at least about 28, or at least about 29, or at least about 30, or at least about 31, or at least about 32, or at least about 33, or at least about 34, or at least about 35, or at least about 36, or at least about 37, or at least about 38, or at least about 39 or at least about 40 nucleotides in length.

[0141] In the context of a probe, a target identification domain is a polynucleotide that comprises a nucleic acid sequence that identifies the target analyte bound to the target binding domain of that probe. That is to say, the target identification domain comprises a specific nucleic acid sequence that is a priori assigned to the specific target analyte bound to the target binding to which the target identification domain is attached. In a non-limiting example, a probe designated as “probe X” designed to spatially detect “target analyte X” comprises a target binding domain designated “target binding domain X” linked to an target identification domain “target identification domain X”. Target binding domain Xbinds to target analyte X and target identification domain X comprises a nucleic acid sequence, designated as “nucleic acid sequence X”, which corresponds to target analyte X. Thus, if a skilled artisan practicing the methods of the present disclosure were to collect probes a region of interest in sample and obtain nucleic acid sequence X after sequencing, the skilled artisan would understand that to indicate that target analyte X was present in that region of interest. The amount, or number of sequencing reads, of nucleic acid sequence X can be used to determine the quantify, in absolute or relative terms, the amount of target analyte X within the region of interest.

[0142] In some aspects of the methods of the present disclosure, a probe can comprise a unique molecular identifier (UMI).

[0143] In some aspects, a unique molecular identifier can be at least about 9 nucleotides to at least about 19 nucleotides in length. In some aspects, a unique molecular identifier can be at least about 4 nucleotides to at least about 24 nucleotides in length. In some aspects, a unique molecular identifier can be about 14 nucleotides in length. The terms unique molecular identifier and random molecular tags are used interchangeably herein. Using methods known in that art, unique molecular identifiers can be used to correct for biases in amplification prior to sequencing.

[0144] In some aspects of the methods and compositions of the present disclosure, a molecular identifier can comprise at least about 5, or at least about 10 nucleotides, or at least about 15, or at least about 20, or at least about 25, or at least about 30, or at least about 35, or at least about 40, or at least about 45, or at least about 50 nucleotides.

[0145] In some aspects of the methods of the present disclosure, a probe can comprise an amplification primer binding site. As used herein, the term “amplification primer binding site” is used in its broadest sense to refer to a nucleic acid sequence that is complementary to, or at least partially complementary to at least one amplification primer, wherein the amplification primer is a short single-stranded or partially single-stranded oligonucleotide that is sufficient to prime DNA and/or RNA synthesis, for example, by PCR.

[0146] In some aspects of the methods of the present disclosure, an amplification primer binding site can comprise at least about 5, at least about 10, at least about 15, at least about 20, at least about 25, at least about 30, at least about 35, at least about 40, at least about 45, at least about 50, at least about 55, at least about 60, at least about 65 or at least about 70 nucleotides.

[0147] In some aspects of the methods of the present disclosure, a probe can comprise a constant region. In some aspects a constant region can comprise a specific nucleic acid sequence that is the same for each location of the tissue sample.

[0148] In some aspects of the methods of the present disclosure, a constant region can be at least about 1, or at least about 2, or at least about 3, or at least about 4, or at least about 5, or at least about 6, or at least about 7, or at least about 8, or at least about 9, or at least about 10, or at least about 11, or at least about 12, or at least about 13, or at least about 14, or at least about 15, or at least about 16, or at least about 17, or at least about 18, or at least about 19, or at least about 20, or at least about 21, or at least about 22, or at least about 23, or at least about 24, or at least about 25, or at least about 26, or at least about 27, or at least about 28, or at least about 29, or at least about 30 nucleotides in length.

[0149] In some aspects of the methods of the present disclosure, a constant region can be located between a target identification domain and a free 3′-OH moiety, such that after a spatial barcode is added to the probe in situ, the constant region is located between the target identification and the extended spatial barcode. Without wishing to be bound by theory, the constant region can be used during sequence analysis to define the beginning of the spatial barcode domain.

[0150] In some aspects of the methods of the present disclosure, a probe can be a single-stranded polynucleotide comprising, from 5′ to 3′, a target-binding domain, followed by an amplification primer binding site, followed by a unique molecular identifier, followed by a target identification domain. A schematic of the aforementioned probe is shown in FIG. 10.

[0151] In some aspects of the methods of the present disclosure, a probe can be a single-stranded polynucleotide comprising, from 5′ to 3′, a target-binding domain, followed by an amplification primer binding site, followed by a unique molecular identifier, followed by a target identification domain, followed by a constant region. A schematic of the aforementioned probe is shown in FIG. 20.

[0152] In some aspects of the methods of the present disclosure a probe can be a single-stranded polynucleotide comprising, from 5′ to 3′, a target binding domain, followed by an amplification primer binding site, followed by a target identification domain, followed by a unique molecular identifier.

[0153] In aspects, probes are provided to a sample at concentrations typically less than that used for immunohistochemistry (IHC) or for in situ hybridization (ISH). Alternately, the concentration may be significantly less than that used for IHC or ISH. For example, the probe concentration may be 2 fold less, 5 fold less, 10 fold less, 20 fold less, 25 fold less, 30 fold less, 50 fold less, 60 fold less, 70 fold less, 80 fold less, 90 fold less, 100 fold less, 200 fold less, 300 fold less, 400 fold less, 500 fold less, 600 fold less, 700 fold less, 800 fold less, 900 fold less, 1000 fold less, 2000 fold less, or less and any number in between. In aspects, probes are provided at a concentration of 100 nM, 70 nM, 60 nM, 50 nM, 40 nM, 30 nM, 20 nM, 10 nM, 9 nM, 8 nM, 7 nM, 6 nM, 5 nM, 4 nM, 3 nM, 2 nM, 1 nM, 0.9 nM, 0.8 nM, 0.7 nM, 0.6 nM, 0.5 nM, 0.4 nM, 0.3 nM, 0.2 nM, 0.1 nM, 0.09 nM, 0.08 nM, 0.07 nM, 0.06 nM, 0.05 nM, 0.04 nM, 0.03 nM, 0.02 nM, 0.01 nM, and less and any concentration in between.

[0154] Background noise, during protein detection, can be reduced by performing a negative purification of the intact probe molecule. This can be done by conducting an affinity purification of the probe after collection of eluate from a region of interest.

[0155] In some aspects of the methods of the present disclosure at least one, or at least two, or at least three, or at least four, or at least five, or at least six, or at least seven, or at least eight, or at least nine, or at least ten, or at least eleven, or at least twelve, or at least thirteen, or at least fourteen, or at least fifteen, or at least sixteen, or at least seventeen, or at least eighteen, or at least nineteen, or at least twenty, or at least thirty, or at least forty, or at least fifty, or at least sixty, or at least seventy, or at least eighty, or at least ninety, or at least one hundred probes can bind to a single target analyte. As used herein, the term “tiling” is used to describe when more than one probe of the present disclosure is bound to a target analyte.

[0156] A set of probes, a plurality of probes, a solution comprising a plurality of probes can include at least one species of probes, i.e., directed to one target. A set of probes preferably includes at least two, e.g., 3, 4, 5, 6, 7, 8, 9, 10, 11, 12, 13, 14, 15, 16, 17, 18, 19 20, 30, 40, 50, 60, 70, 80, 90, 100, 200, 300, 400, 500, 600, 700, 800, 900, 1000 or more species of probes. A probe set may include one or multiple copies of each species of probe.

[0157] A first set of, a first plurality of or a first solution comprising probes only may be applied to a sample. Alternately, a second set (or higher number) of probes may be later applied to the sample. The first set and second (or higher number) may target only nucleic acids, only proteins, or a combination thereof.

[0158] In the present disclosure, two or more targets (i.e., proteins, nucleic acids, or a combination thereof) are detected; 3, 4, 5, 6, 7, 8, 9, 10, 11, 12, 13, 14, 15, 16, 17, 18, 19 20, 30, 40, 50, 60, 70, 80, 90, 100, 200, 300, 400, 500, 600, 700, 800, 900, 1000 or more targets, and any number there between, are detected.

[0159] A set of probes may be pre-defined based upon the cell type or tissue type to be targeted. For example, if the tissue is a breast cancer, then the set of probes will include probes directed to proteins relevant to breast cancer cells (e.g., Her2, EGFR, and PR) and/or probes directed to proteins relevant to normal breast tissues. Additionally, the set of probes may be pre-defined based upon developmental status of a cell or tissue to be targeted. Alternately, the set of probes may be pre-defined based upon subcellular localizations of interest, e.g., nucleus, cytoplasm, and membrane. For example, antibodies directed to Foxp3, Histone H3, or P-S6 label the nucleus, antibodies directed to CD3, CD4, PD-1, or CD45RO label the cytoplasm, and antibodies directed to PD-L1 label membranes.

### Spatial Barcode Domains

[0160] In some aspects of the methods of the present disclosure, a spatial barcode domain can comprise a spatial identifier sequence, wherein the spatial identifier sequence comprises a nucleic acid sequence that is unique to a specific location/region of interest within a tissue sample. In this way, when a probe on which a spatial barcode has been extended is collected and sequenced, the user can use the spatial identifier sequence of the spatial barcode domain to determine in what location/region of interest of the tissue sample the probe in when it was bound to its corresponding target analyte.

[0161] In some aspects, a spatial identifier sequence can comprise at least about 1, or at least about 2, or at least about 3, or at least about 4, or at least about 5, or at least about 6, or at least about 7, or at least about 8, or at least about 9, or at least about 10, or at least about 11, or at least about 12, or at least about 13, or at least about 14, or at least about 15, or at least about 16, or at least about 17, or at least about 18, or at least about 19, or at least about 20 nucleotides in length, or at least about 21, or at least about 22, or at least about 23, or at least about 24, or at least about 25, or at least about 26, or at least about 27, or at least about 28, or at least about 29, or at least about 30, or at least about 31, or at least about 32, or at least about 33, or at least about 34, or at least about 35, or at least about 36, or at least about 37, or at least about 38, or at least about 39 or at least about 40 nucleotides. In some aspects, a spatial identifier sequence can comprise at least about 20 nucleotides.

[0162] In some aspects of the methods of the present disclosure, a spatial identifier sequence can comprise at least one, at least two, at least three, at least four, at least five, at least six, at least seven, at least eight, at least nine, at least 10, at least 11, at least 12, at least 13, at least 14, at least 15, at least 16, at least 17, at least 18, at least 19 or at least 20 spatial identification domains. FIG. 11 is schematic of a probe of the present disclosure comprising a target binding domain, an amplification primer binding site, a unique molecular identifier and a target identification domain, along with a spatial barcode domain that has been synthesized by TdT extension in the methods of the present disclosure. In this non-limiting example, the spatial barcode domain comprises a spatial identifier sequence, wherein the spatial identifier sequence comprises four (#1, #2, #3 and #4) spatial identification domains.

[0163] A spatial identification domain can comprise at least about one, or at least about two, or at least about three, or at least about four, or at least about five, or at least about six, or at least about seven, or at least about eight, or at least about nine, or at least about ten, or at least about 11, or at least about 12, or at least about 13, or at least about 14, or at least about 15, or at least about 16 or at least about 17, or at least about 18, or at least about 19, or at least about 20 nucleotides. In some aspects, and spatial identification domain can comprise

[0164] In some aspects of the methods of the present disclosure, an individual spatial identification domain within a single spatial barcode domain can comprise the same number or a different number of nucleotides as compared to another individual spatial identification domain within that same single spatial barcode domain. In a non-limiting example, a spatial barcode domain may comprise four spatial identification domains, a first spatial identification domain, a second spatial identification domain, a third spatial identification domain and a fourth spatial identification domain. The first spatial identification domain may comprise two nucleotides, a second spatial identification domain may comprise three nucleotides, the third spatial identification domain may comprise two nucleotides and the fourth spatial identification domain may comprise four nucleotides. Thus, in this non-limiting example, the first spatial identification domain comprises the same number of nucleotides as the third spatial identification domain, but a different number of nucleotides as compared to the second spatial identification domain and the fourth spatial identification domain.

[0165] In some aspects of the methods of the present disclosure, each spatial identification domain within a single spatial barcode may comprise the same nucleotide at the 3′-terminus. In a non-limiting example, a spatial barcode domain may comprise four spatial identification domains, a first spatial identification domain, a second spatial identification domain, a third spatial identification domain, and fourth spatial identification domain. In this non-limiting example, each spatial identification domain comprises a “C” nucleotide at the 3′ terminus. Thus, the first spatial identification domain may comprise the nucleotide sequence 5′-ATC-3′, the second spatial identification domain may comprise the nucleotide sequence 5′-TGC-3′, the third spatial identification domain may comprise the nucleotide sequence 5′-TAC-3′ and the fourth spatial identification domain may comprise the nucleotide sequence 5′-AAC-3′. Note in this non-limiting example each spatial identification domain in the spatial barcode comprises the same number of nucleotides.

[0166] In some aspects of the methods of the present disclosure, each spatial identification domain within any spatial barcode present within a sample may comprise the same nucleotide at the 3′-terminus.

[0167] In another non limiting example, a spatial barcode domain may comprise four spatial identification domains, a first spatial identification domain, a second spatial identification domain, a third spatial identification domain, and fourth spatial identification domain. In this non-limiting example, each spatial identification domain comprises a “C” nucleotide at the 3′ terminus. Thus, the first spatial identification domain may comprise the nucleotide sequence 5′-AC-3′, the second spatial identification domain may comprise the nucleotide sequence 5′-GTC-3′, the third spatial identification domain may comprise the nucleotide sequence 5′-TATC-3′ and the fourth spatial identification domain may comprise the nucleotide sequence 5′-AAC-3′. Note in this non-limiting example the spatial identification domains in the spatial barcode comprises differing number of nucleotides (the first spatial identification domain has two nucleotides, the second spatial identification domain has three nucleotides, the third spatial identification domain has four nucleotides and the fourth spatial identification domain has three nucleotides) and each spatial identification domain has a “C” nucleotide at the 3′ terminus.

[0168] Without wishing to be bound by theory, whether each spatial identification domain within a spatial barcode has the same number of nucleotides or a differing number of nucleotides can determine the number of extension cycles that are needed and the number of different spatial barcodes that can be constructed, and consequently, the number of regions of interest that can be analyzed on a single tissue sample. For example, a spatial barcode domain may comprise 10 or 11 spatial identification domains, wherein each spatial identification domain comprises 1 nucleotide. This would allow for the creation of 4¹⁰ to 4¹¹ unique spatial barcode sequences, meaning that 4¹⁰ to 4¹¹ different regions of interest could be analyzed on a single tissue sample. In this configuration, 40-44 extensions cycles would be needed in order to construct all of the barcodes on the tissue sample. In another example, approximately 2.1 million unique spatial barcodes could be constructed if spatial identification domains could have differing numbers of nucleotides ranging from 1 nucleotide to 4 nucleotides. In this configuration, the spatial barcodes would be 7 to 28 nucleotides in total length, and only 28 extension cycles would be needed to construct all of the barcodes.

[0169] The spatial barcode domain corresponding a first location in a tissue sample may have more than, less than, or the same number of spatial identification domains as a spatial barcode domain corresponding to a second location in a tissue sample.

[0170] A spatial barcode domain can comprise a nucleic acid sequence that is specific and unique to a single location/region of interest in a tissue sample. For example, the combined nucleic acid sequence of all of the spatial identification domains within a spatial barcode domain can be specific and unique to a single location/region of interest in a tissue sample. In this way, when a probe on which a spatial barcode has been extended is collected and sequenced, the user can use the sequence of the spatial barcode domain to determine in what location/region of interest of the tissue sample the probe in when it was bound to its corresponding target analyte.

[0171] A spatial identification domain can comprise at least about one, or at least about two, or at least about three, or at least about four, or at least about five, or at least about six, or at least about seven, or at least about eight, or at least about nine, or at least about ten, or at least about 11, or at least about 12, or at least about 13, or at least about 14, or at least about 15, or at least about 16 or at least about 17, or at least about 18, or at least about 19, or at least about 20 nucleotides. In some aspects, and spatial identification domain can comprise

[0172] In some aspects of the methods of the present disclosure, the methods can further comprise, after the spatial barcode domains are synthesized in each location of the tissue sample (e.g. step (e)), repeating steps (c) and (d) to extend the spatial barcode domain in each location of the tissue sample such that the spatial barcode domain comprises, at the 3′ end, a delimiting domain.

[0173] A delimiting domain can comprise a specific nucleic acid sequence that is the same for each location of the tissue sample. A delimiting domain can be at least 1, or at least 2, or at least 3, or at least 4, or at least 5, or at least 6, or at least 7, or at least 8, or at least 9, or at least 10, or at least 11 or at least 12, or at least 13, or at least 14, or at least 15, or at least 16, or at least 17, or at least 18, or at least 19, or at least 20 nucleotides in length. A delimiting domain can comprise any nucleic acid sequence. In a non-limiting example, the delimiting domain can comprise the nucleic acid sequence “TCTC”. FIG. 12 is a schematic of the probe of FIG. 11, wherein the spatial barcode domain has been further extended by TdT synthesis to include a delimiting domain.

[0174] Without wishing to be bound by theory, the sequence of a delimiting domain can be used during sequencing analysis to define the end of the spatial barcode domain, thereby aiding in the quantification via sequencing of the collected probes.

[0175] In some aspects of the methods of the present disclosure, the methods can further comprise, after the spatial barcode domains are synthesized in each location of the tissue sample (e.g. step (e)), extending the spatial barcode domain in each location of the tissue sample such that the spatial barcode domain comprises a polyT domain or other amplification primer binding site.

[0176] In some aspects of the methods of the present disclosure, the methods can further comprise after the spatial barcode domains are synthesized in each location of the tissue sample (e.g. step (e)): (i) repeating steps (c) and (d) to extend the spatial barcode domain in each location of the tissue sample such that the spatial barcode domain comprises, a delimiting domain: and (ii) extending the spatial barcode domain in each location of the tissue sample such that the spatial barcode domain comprises a polyT domain.

[0177] FIG. 13 is a schematic of the probe of FIG. 11, wherein the spatial barcode domain has been further extended by TdT synthesis to include a delimiting domain and then further extended by TdT synthesis to include a polyT domain.

[0178] FIG. 21 is a schematic of the probe of FIG. 20, wherein the probe has been extended by TdT synthesis in the methods of the present disclosure to include a spatial barcode domain, wherein the spatial barcode domain comprises four spatial identification domains, a delimiting domain and a polyT domain.

[0179] In some aspects, a polyT domain is a polynucleotide that is comprised of only T nucleotides. In some aspects, the polyT domain can comprise at least about 1, or at least about 2, or at least about 3, or at least about 4, or at least about 5, or at least about 6, or at least about 7, or at least about 8, or at least about 9, or at least about 10, or at least about 11 or at least about 12, or at least about 13, or at least about 14, or at least about 15, or at least about 16, or at least about 17, or at least about 18, or at least about 19, or at least about 20 nucleotides, or at least about 25, or at least about 30, or at least about 35, or at least about 40, or at least about 50, or at least about 55, or at least about 60, or at least about 65, or at least about 70, or at least about 75, or at least about 80, or at least about 85, or at least about 90, or at least about 95, or at least about 100, or at least about 125, or at least about 150, or at least about 175, or at least about 200, or at least about 225, or at least about 250, or at least about 275, or at least about 300, or at least about 350, or at least about 400, or at least about 450, or at least about 500, or at least about 2000 T nucleotides. In some aspects, a polyT domain comprises more than 20 but less than 500 T nucleotides. In some aspects, a polyT domain comprises more than 20 but less than 2000 T nucleotides.

[0180] In some aspects, a polyT domain of a spatial barcode domain of a first bound probe can the same length or a different length than a polyT domain of a spatial barcode domain of a second bound probe.

[0181] In some aspects, extending the spatial barcode domain in each location of the tissue sample such that the spatial barcode domain comprises a polyT domain can comprise contacting the sample with a solution comprising dTTP and TdT.

### Amplification Methods

[0182] In some aspects of the methods of the present disclosure, quantifying via sequence can comprise amplifying the probes collected from the tissue sample.

[0183] In some aspects, amplifying the probes collected from the tissue sample can comprise amplifying the collected probes using a first amplification primer and a second amplification. In some aspects amplifying the probes collected from the tissue sample can comprise contacting the collected probes with a first amplification primer and a second amplification primer, wherein the first amplification primer and the second amplification primer hybridize to the collected probes. In some aspects, amplifying the probes collected from the tissue sample can comprise amplification reactions known in the art, including, but not limited to PCR.

[0184] In some aspects of the methods of the present disclosure, an amplification can comprise at least one NGS index sequence. In some aspects, the NGS index sequence is an i5 index sequence or an i7 index sequence. In some aspects, the NGS index sequence can be any index sequence known in the art.

[0185] In some aspects, an NGS index sequence can be at least about 1, or at least about 2, or at least about 3, or at least about 4, or at least about 5, or at least about 6, or at least about 7, or at least about 8, or at least about 9, or at least about 10, or at least about 11, or at least about 12, or at least about 13, or at least about 14, or at least about 15, or at least about 16, or at least about 17, or at least about 18, or at least about 19, or at least about 20 nucleotides in length. In some aspects, an NGS index sequence is at least about 8 nucleotides in length. In some aspects, an NGS index sequence is at least about 10 nucleotides in length.

[0186] In some aspects of the methods of the present disclosure, an amplification primer can comprise an i5 index sequence, wherein the i5 sequence comprises the sequence set forth in any one of SEQ ID NOs: 8-13 and 20-10,404, or the reverse complement thereof.

TABLE 1

Exemplary i5 index sequences

| Sequence | SEQ ID NO: |
|---|---|
| GAATGCACGA | 8 |
| AAGACTATAG | 9 |
| TCGGCAGCAA | 10 |
| CTAATGATGG | 11 |
| GGTTGCCTCT | 12 |
| CGCACATGGC | 13 |

[0187] In some aspects of the methods of the present disclosure, an amplification primer can comprise an i7 index sequence, wherein the i7 sequence comprises the sequence set forth in any one of SEQ ID NO: 14-10,404, or the reverse complement thereof.

TABLE 2

Exemplary i7 index sequences

| Sequence | SEQ ID NO: |
|---|---|
| CGGCAATGGA | 14 |
| GCCGTAACCG | 15 |
| AACCATTCTC | 16 |
| GGTTGCCTCT | 17 |
| CTAATGATGG | 18 |
| TCGGCCTATC | 19 |

[0188] In some aspects of the methods of the present disclosure, an amplification primer can comprise a sequencing primer binding site. In some aspects, a sequencing primer binding site can be at least about 1, or at least about 2, or at least about 3, or at least about 4, or at least about 5, or at least about 6, or at least about 7, or at least about 8, or at least about 9, or at least about 10, or at least about 11, or at least about 12, or at least about 13, or at least about 14, or at least about 15, or at least about 16, or at least about 17, or at least about 18, or at least about 19, or at least about 20 nucleotides in length, or at least about 21, or at least about 22, or at least about 23, or at least about 24, or at least about 25, or at least about 26, or at least about 27, or at least about 28, or at least about 29, or at least about 30, or at least about 31, or at least about 32, or at least about 33, or at least about 34, or at least about 35, or at least about 36, or at least about 37, or at least about 38, or at least about 39 or at least about 40 nucleotides in length.

[0189] In some aspects, a sequencing primer binding site is at least about 9 nucleotides in length. In some aspects, a sequencing primer binding site is at least about 34 nucleotides in length.

[0190] In some aspects of the methods of the present disclosure, an amplification primer can comprise a flow cell adapter sequence, wherein the flow cell adapter sequence is suitable for sequencing. At least one amplification primer used in the methods of the present disclosure can comprise a P5 flow cell adapter sequence, wherein the P5 flow cell adapter sequence comprises the sequence set forth in SEQ ID NO: 10,405, or the reverse complement thereof. At least one amplification primer used in the methods of the present disclosure can comprises a P7 flow cell adapter sequence, wherein the P7 flow cell adapter sequence comprises the sequence set forth in SEQ ID NO: 10,406, or the reverse complement thereof.

[0191] In some aspects, a flow cell adapter sequence can comprise between about 15 to about 40 nucleotides. A flow cell adapter sequence can comprise about 29 nucleotides. A flow cell adapter sequence can comprise about 24 nucleotides.

[0192] In some aspects of the methods and compositions of the present disclosure, a flow cell adapter sequence suitable for sequencing can comprise at least about 5, at least about 10, at least about 15, at least about 20, at least about 25, at least about 30, at least about 35 at least about 40, at least about 45, at least about 50, at least about 55, at least about 60, at least about 65, at least about 70, at least about 75, at least about 80, at least about 85, at least about 90, at least about 95 or at least about 100 nucleotides.

[0193] In some aspects, an amplification primer can comprise a polyA domain. In some aspects, a polyA domain is a polynucleotide that is comprised of only A nucleotides. In some aspects, the polyA domain can comprise at least about 1, or at least about 2, or at least about 3, or at least about 4, or at least about 5, or at least about 6, or at least about 7, or at least about 8, or at least about 9, or at least about 10, or at least about 11 or at least about 12, or at least about 13, or at least about 14, or at least about 15, or at least about 16, or at least about 17, or at least about 18, or at least about 19, or at least about 20 nucleotides, or at least about 25, or at least about 30, or at least about 35, or at least about 40 A nucleotides. In some aspects, a polyA domain can comprise at last about 32 nucleotides. In some aspects, a polyA domain can be used to hybridize a sequence probe to an extended spatial barcode domain by hybridizing the polyA domain to a polyT domain.

[0194] In some aspects, an amplification primer can comprise a degenerate base. In some aspects, an amplification primer can comprise at least about two degenerate bases. In some aspects, an amplification primer can comprise at least about three, or at least about four, or at least about five, or at least about six, or at least about seven, or at least about eight, or at least about nine, or at least about ten degenerate bases. In some aspects, the degenerate base(s) can be located at the 3′ end of an amplification primer. In some aspects, in the context of a plurality of amplification primers, a degenerate base position may have an A, a T, a C or a G nucleotide within the plurality. In some aspects, in the context of a plurality of amplification primers, a degenerate base position may have an A, a C or a G nucleotide.

[0195] FIG. 14A is an exemplary schematic of a method of amplifying the probes collected from the tissue sample as part of quantifying the probes via sequencing. In this non-limiting example, the probe has a target binding domain, followed by an amplification primer binding site, followed by a unique molecular identifier, followed by a target identification domain. In this non-limiting example, a spatial barcode has been synthesized and extended on the 3′ end of the probe. The spatial barcode domain has been synthesized by TdT extension and comprises a spatial identifier sequence comprising four (#1, #2, #3 and #4) spatial identification domains, a delimiting domain and a polyT domain. In this non-limiting example, a first amplification primer has a flow cell adapter sequence (P5), followed by an NGS index sequence (i5), followed by a sequencing primer binding site, followed by a sequence that matches the amplification primer bindings site on the probe. In this non-limiting example, a second amplification primer has a polyA domain, followed by a sequencing primer binding site, followed by an NGS index sequence (i7), followed by a Flow Cell Adapter sequence (P7). The amplification primers can be hybridized to the probes as shown and used to amplify the probe using standard techniques, including, but not limited to, PCR, as would be appreciated by the skilled artisan.

[0196] FIG. 14B is an exemplary schematic of a method of amplifying the probes collected from the tissue sample as part of quantifying the probes via sequencing. In this non-limiting example, the probe has a target binding domain, followed by an amplification primer binding site, followed by a unique molecular identifier, followed by a target identification domain. In this non-limiting example, a spatial barcode has been synthesized and extended on the 3′ end of the probe. The spatial barcode domain has been synthesized by TdT extension and comprises a spatial identifier sequence comprising four (#1, #2, #3 and #4) spatial identification domains, a delimiting domain and a polyT domain. In this non-limiting example, a first amplification primer has a flow cell adapter sequence (P5), followed by an NGS index sequence (i5), followed by a sequencing primer binding site, followed by a sequence that matches the amplification primer bindings site on the probe. In this non-limiting example, a second amplification primer has two degenerate bases (3′-NB-5′, wherein N is A, T, C or G and B is A, C or G), followed by a polyA domain, followed by a sequencing primer binding site, followed by an NGS index sequence (i7), followed by a Flow Cell Adapter sequence (P7). The degenerate bases are located at the 3′-terminus of the second amplification primer. The amplification primers can be hybridized to the probes as shown and used to amplify the probe using standard techniques, including, but not limited to, PCR, as would be appreciated by the skilled artisan.

[0197] In some aspects of the methods of the present disclosure, an amplification primer can comprise an affinity moiety. An affinity moiety can include, but is not limited to, biotin. In aspects wherein an amplification primer comprises an affinity moiety, the affinity moiety can be used to further purify the amplified probes using a reagent that specifically binds to the affinity moiety. In some aspects wherein the affinity moiety is biotin, streptavidin-coated beads can be used to purify the amplified probes.

### Illumination Methods

[0198] In some aspects of the methods of the present disclosure, illuminating a location of a tissue sample can comprise illuminating the location using a two-photon excitation method. In some aspects, the two-photon excitation method is a two-photon excitation method using light that has a near-infrared (NIR) wavelength. In some aspects, a NIR wavelength can be about 700 to about 1000 nm. Without wishing to be bound by theory, two-photo excitation allows for improved spatial confinement and minimized excitation crosstalk as compared with one-photon excitation methods, including one-photon excitation methods at UV (300-405 nm) wavelengths. Thus, spatial barcodes can be synthesized in smaller, more defined regions of the tissue sample, increasing the spatial resolution and accuracy of the methods of the present disclosure.

[0199] In some aspects, a two-photon excitation method can be a patterned two-photon illumination method. A patterned two-photon illumination method can comprise raster scanning a point of excitation light over a sample. This raster scanning can be achieved through the use of galvanometric mirrors, micro-electro-mechanical systems (MEMS) mirrors, acousto-optic deflectors or any combination thereof. A patterned two-photon illumination method can comprise rapidly modulating a laser on and off on a per-pixel basis. Such modulating can be achieved through the use of an acousto-optic modulator, a Pockels cell or any combination thereof. In some aspects, a patterned two-photon illumination method can comprise raster scanning a point of excitation light over a sample and rapidly modulating a laser on and off on a per-pixel basis.

[0200] Exemplary optical schematics of a two-photon excitation method is shown in FIGS. 5A and 5B.

[0201] In some aspects of the methods of the present disclosure, a two-photon excitation method can comprise the use of erbium fiber laser. In some aspects, an erbium fiber laser can emit light at a wavelength of about 1550 nm. In some aspects, the light from an erbium fiber laser can be frequency doubled to about 775 nm with pulse widths less than 100 femtoseconds.

[0202] In some aspects of the methods of the present disclosure, a two-photon excitation method can comprise the use of a 780 nm fiber-based femtosecond laser. In some aspects, the repetition rate of the laser can be specified from 10 to 80 MHz with clean pulse widths of less than 90 femtoseconds. In some aspects, the beam quality, M² factor, can be less than 1.2. In some aspects, the beam diameter can be about 1.57 mm. In some aspects, the beam circularity can be at least 94%.

[0203] The application of two photon illumination in the present invention resulted in three surprising improvements in the ability to detect and quantify protein and/or nucleic acid expression in a user-defined region of a tissue, user-defined cell, and/or user-defined subcellular structure within a cell. First, two photon illumination as used in the present invention provides dramatic improvements in Z and modest improvements in X-Y resolution. Second, with two photon illumination of the background in the whole field of view away from the features is also lower (see FIG. 22). Third and perhaps most significant, with one-photon UV illumination, there are unexpected diffraction, scattering and/or light piping phenomena caused by cellular structures. These artifacts can significantly degrade the ability to focus UV light below diffraction expectations. These tissue artifacts are not present with two photon illumination as used in the present invention.

### Locations or Regions of Interest

[0204] As used herein, the terms “location of a tissue sample” and a “region of interest” are used interchangeably to refer to a specific and defined area of the tissue sample within which the abundance of one or more target analytes will be quantified.

[0205] In some aspects of the methods of the present disclosure, a region of interest can be no less than about 10 nm in the x and/or y direction, no less than about 100 nm in the x and/or y direction, or no less than about 400 nm in the x and/or y direction. In some aspects of the methods of the present disclosure, an illuminated location of a tissue sample can be no less than about 10 nm in the x and/or y direction, no less than about 100 nm in the x and/or y direction, or no less than about 400 nm in the x and/or y direction.

[0206] In some aspects of the methods of the present disclosure, a region of interest can be no less than about 10 nm in the z direction, no less than about 500 nm in the z direction, or no less than about 1500 nm in the z direction. In some aspects of the methods of the present disclosure, an illuminated location of a tissue sample can be no more than about 1500 nm in the z direction.

[0207] A region of interest may be a tissue type present in a sample, a cell type, a cell, or a subcellular structure within a cell.

[0208] Together, a comparison of the identity and abundance of the target proteins and/or target nucleic acids present in a first region of interest (e.g., tissue type, a cell type (including normal and abnormal cells), and a subcellular structure within a cell) and the identity and abundance of the target proteins and/or target nucleic acids present in second region of interest or more regions of interest can be made using the methods of the present disclosure.

[0209] In some aspects, a region of interest may comprise a single cell. In some aspects, a region of interest may include a plurality of cells, such as, but not limited to, no more than two cells, no more than three cells, no more than four cells, no more than five cells, no more than six cells, no more than seven cells, no more than eight cells, no more than nine cells or no more than ten cells.

[0210] In some aspects, a region of interest may comprise a subcellular structure within a single cell.

[0211] In some aspects, an area of the tissue sample may be manually selected by a user and each cell within the area would be automatically identified as a region of interest and encoded. Cells can be identified by specific staining, and software used to locate the boundaries of the cell. Thus, the methods and systems described herein can encode each cell differently with minimal user interaction.

### Probe Collection

[0212] In some aspects of the methods of the present disclosure, the step of collecting the probes bound to target analytes in the tissue sample can comprise scraping the tissue sample, digesting the tissue sample with proteinase K or a combination thereof. In some aspects, a proteinase K digestion can be performed at about 56° C. for at least about one hour, followed by a further digestion at about 90° C. for at least about 15 minutes.

[0213] In some aspects of the methods of the present disclosure, the step of collecting the probes bound to target analytes in the tissue sample can comprise an Ampure SPRI purification, as would be appreciated by the skilled artisan.

[0214] In some aspects of the methods of the present disclosure, the step of collecting the probes bound to target analytes in the tissue sample can comprise an xGen hybridization capture-based purification, as would be appreciated by the skilled artisan.

[0215] In some aspects, an xGen hybridization capture-based purification comprises hybridizing at least one at least one capture probe to the probes bound to target analytes in the tissue sample.

[0216] In some aspects, a capture probe can comprise and affinity moiety. An affinity moiety can be biotin.

[0217] In some aspects, a capture probe can comprise at least one copy of a nucleic acid sequence that is complementary to a probe of the present disclosure. In some aspects, a capture probe can comprise at least about two copies of a nucleic acid sequence that is complementary to a probe of the present disclosure. In some aspects, a capture probe can comprise at least about three, or at least about four, or at least about five, or at least about six, or at least about seven, or at least about eight, or at least about nine, or at least about ten copies of a nucleic acid sequence that is complementary to a probe of the present disclosure. The nucleic acid sequence that is complementary to a probe of the present disclosure can be complementary to an amplification primer binding site located on the probe.

[0218] FIG. 23 is an exemplary schematic of a method of purifying the probes collected from the tissue sample as part of quantifying the probes via sequencing. In this non-limiting example, the probe has a target binding domain, followed by an amplification primer binding site, followed by a unique molecular identifier, followed by a target identification domain. In this non-limiting example, a spatial barcode has been synthesized and extended on the 3′ end of the probe. The spatial barcode domain has been synthesized by TdT extension and comprises a spatial identifier sequence comprising four (#1, #2, #3 and #4) spatial identification domains, a delimiting domain and a polyT domain. In this non-limiting example, a capture probe is used, wherein the capture probe comprises two copies of a sequence that is complementary to the amplification primer binding site on the probe. The capture probe further comprises a biotin moiety. The capture probe is hybridized to the probe, and then the biotin moiety is bound to streptavidin-beads in 5x SSPE buffer. The beads can then be washed in hot 5x SSPE and room temperature (RT) 0.1× SSPE. The probes can then be eluted from the streptavidin beads in hot H₂O.

[0219] Example 4 describes non-limiting examples of xGen hybridization capture-based purifications that can be used in the methods of the present disclosure. As would be appreciated by the skilled artisan, the volumes of reagents, the amounts of reagents, the concentration of reagents, the length of certain steps and the temperature at which certain steps are performed described in Example 4 can be modified and optimized for particular sample types and/or sizes.

### Tissue Sample Pre-treatment

[0220] In some aspects of the methods of the present disclosure, the step of contacting a tissue sample with at least one probe or a plurality of probes can comprise incubating the tissue sample with the at least one probe or the plurality of probes for at least about one hour, or at least about two hours, or at least about three hours, or at least about four hours, or at least about five hours, or at least about six hours, or at least about seven hours, or at least about eight hours, or at least about nine hours, or at least about 10 hours, or at least about 11 hours, or at least about 12 hours, or at least about 24 hours, or at least about 36 hours, or at least about 48 hours.

[0221] In some aspects of the methods of the present disclosure, the step of contacting a tissue sample with at least one probe or a plurality of probes can comprise contacting the tissue sample with the at least one probe or a plurality of probes in combination with blocking DNA that has been terminated with ddTTP.

[0222] In some aspects of the methods of the present disclosure, prior to contacting a tissue sample with at least one probe or a plurality of probes, the tissue sample can be subjected to ddTTP (dideoxthymidine-triphosphate) termination. ddTTP termination can comprise contacting the tissue sample with ddTTP and TdT. Without wishing to be bound by theory, ddTTP termination is performed to remove block free 3′-OH moieties of endogenous nucleic acids within the tissue sample, preventing the endogenous nucleic acids from being extended during the extension of the spatial barcodes.

[0223] In some aspects of the methods of the present disclosure, the step of collecting the probes bound to target analytes in the tissue sample can comprise ExoIII digestion. Without wishing to be bound by theory, ExoIII digestion allows for the removal of dsDNA and the enrichment of ssDNA or dsDNA with a protruding 3′ overhang.

### Landmarking Probes and Methods

[0224] In some aspects, the methods of the present disclosure can further comprise incubating a sample with at least one general landmarking probe of the present disclosure.

[0225] In some aspects, the methods of the present disclosure can further comprise detecting at least one general landmarking probe bound within a sample.

[0226] In some aspects, the detection of at least one general landmarking probe bound within the sample can be used to define the boundaries of individual cells within a sample. By detecting the boundaries of individual cells within a sample, spatial patterns can be determined for downstream synthesis of spatial barcodes within the sample. In some aspects, the detection of one or more general landmarking probes in a sample can be used to generate a fluorescent cell image that subsequently collected gene expression data can then be mapped onto to create a spatially-resolved profile of gene expression.

[0227] In some aspects, a general landmarking probe can comprise a detectable label. In some aspects, the detectable label in be a fluorescent label.

[0228] In some aspects, a general landmarking probe can comprise at least one antibody. The antibody can specifically bind to at least one cellular marker. In some aspects, the at least one antibody can be linked, directly or indirectly, to at least one detectable label.

[0229] A cellular marker can be a cytoplasmic marker. A cellular marker can be any cytoplasmic marker known in the art. Examples of cytoplasmic markers include, but are not limited to, specific proteins that are located exclusively or primarily within the cytoplasm of a cell. Specific proteins that are located exclusively or primarily within the cytoplasm of a cell can include, but are not limited to, microtubule proteins, vimentin, desmin and cytokeratin.

[0230] A cellular marker can be a membrane marker. A cellular marker can be any membrane marker known in the art. Examples of membrane markers include, but are not limited to, specific proteins that are exclusively or primarily on, associated with, or embedded in a specific membrane within a cell. Examples of such proteins include, but are not limited to, sodium-potassium ATPase, plasma membrane calcium ATPase (PMCA), proteins of the cadherin family, CD98, proteins associated with caveolae (e.g. caveolin), any integral membrane protein known in the art and any membrane-associated protein known in the art.

[0231] A cellular marker can be an organelle marker. An organelle marker can be any organelle marker known in the art. Examples of organelle markers include, but are not limited to, specific proteins that are exclusively or primarily associated with a specific organelle (e.g. Endoplasmic reticulum, golgi apparatus, mitochondria, ribosome, lysosome, endosomes, peroxisome, autophagosome, or any other organelle known in the art). Examples of such proteins include, but are not limited to, calreticulin (endoplasmic reticulum), GM130 (golgi apparatus), ATP5A (mitochondria), TOMM20 (mitochondria), RPS3 (ribosome), M6PR (lysosome), EEA1 (endosome), RAB7 (endosome), catalase (peroxisome), SQSTM1/p62 (autophagosome) and LC3B (autophagosome).

[0232] A cellular marker can be a nuclear marker. A nuclear marker can be any nuclear marker known in the art. Examples of nuclear markers include, but are not limited to, specific proteins that are exclusively or primarily associated with the nucleus of a cell, or a specific sub-structure within the nucleus of the cell. Examples of such proteins include, but are not limited to KDM1, NUP98, Lamin A, Lamin C, Lamin, SC35, Fibrillarin, HP1 alpha, CENPA or any other nuclear protein known in the art. Nuclear markers can also include, but are not limited to, nucleic acid stains such as DAPI or SYTO9 to stain cellular nucleic acids.

[0233] In some aspects, a general landmarking probe of the present disclosure can comprise a dye that targets one or more specific membrane(s) in a cell such as the plasma membrane, the nuclear membrane, the endoplasmic reticulum membrane, the lysosome membrane or any other membrane known in the art.

[0234] In some aspects, a general landmarking probe of the present disclosure can be detected in order to define the boundaries of individual cells within a sample. By detecting the boundaries of individual cells within a sample, spatial patterns can be determined for downstream synthesis of spatial barcodes within the sample. In some aspects, the detection of one or more general landmarking probes in a sample can be used to generate a fluorescent cell image that subsequently collected gene expression can then be mapped onto to create a spatially-resolved profile of gene expression.

### Samples

[0235] In some aspects of the present disclosure, samples may comprise any number of things, including, but not limited to: cells (including both primary cells and cultured cell lines) and tissues (including cultured or explanted). In aspects, a tissue sample (fixed or unfixed) is embedded, serially sectioned, and immobilized onto a microscope slide. As is well known, a pair of serial sections will include at least one cell that is present in both serial sections. Structures and cell types, located on a first serial section will have a similar location on an adjacent serial section. The sample can be cultured cells or dissociated cells (fixed or unfixed) that have been immobilized onto a slide. A sample can be a formalin-fixed paraffin-embedded (FFPE) tissue sample.

[0236] In aspects, a tissue sample is a biopsied tumor or a portion thereof, i.e., a clinically-relevant tissue sample. For example, the tumor may be from a breast cancer. The sample may be an excised lymph node.

[0237] The sample can be obtained from virtually any organism including multicellular organisms, e.g., of the plant, fungus, and animal kingdoms; preferably, the sample is obtained from an animal, e.g., a mammal. Human samples are particularly preferred.

[0238] In some aspects, the probes, compositions, methods, and kits described herein are used in the diagnosis of a condition. As used herein the term diagnose or diagnosis of a condition includes predicting or diagnosing the condition, determining predisposition to the condition, monitoring treatment of the condition, diagnosing a therapeutic response of the disease, and prognosis of the condition, condition progression, and response to particular treatment of the condition. For example, a tissue sample can be assayed according to any of the probes, methods, or kits described herein to determine the presence and/or quantity of markers of a disease or malignant cell type in the sample (relative to the non-diseased condition), thereby diagnosing or staging a disease or a cancer.

[0239] In general, samples attached to a slide can be first imaged using fluorescence (e.g., fluorescent antibodies or fluorescent stains (e.g., DAPI)) to identify morphology, regions of interest, cell types of interest, and single cells and then expression of proteins and/or nucleic acids can be digitally counted from the sample on the same slide.

### Sequencing

[0240] In some aspects of the methods of the present disclosure, quantifying via sequencing can comprise using any known sequencing method in the art to determine the number of probes that were collected that a) correspond to a specific target analyte (i.e. comprise a specific target identification domain) and that b) correspond bound to a specific location/region of interest (i.e. comprise the same identifier domains within a spatial barcode domain.

[0241] Sequencing can be performed by any known sequencing method, including, but not limited to next-generation sequencing methods, sequencing by synthesis, massively parallel sequencing, or any other sequencing method known and practice by the skilled artisan.

[0242] In a preferred aspect, nucleic acid amplification can be solid-phase nucleic acid amplification. Thus, in further aspects the invention provides a method of solid-phase nucleic acid amplification of template polynucleotide molecules which comprises: preparing a library of template polynucleotide molecules which have common sequences at their 5′ and 3′ ends using the methods of the present disclosure and carrying out a solid-phase nucleic acid amplification reaction wherein said template polynucleotide molecules are amplified. Compositions and methods for nucleic acid amplification and sequencing have been described in, e.g., US9376678, which is incorporated herein by reference in its entirety.

[0243] The term “solid-phase amplification” as used herein refers to any nucleic acid amplification reaction carried out on or in association with a solid support such that all or a portion of the amplified products are immobilized on the solid support as they are formed. In particular, the term encompasses solid-phase polymerase chain reaction (solid-phase PCR), which is a reaction analogous to standard solution phase PCR, except that one or both of the forward and reverse amplification primers is/are immobilized on the solid support.

[0244] Although the invention encompasses “solid-phase” amplification methods in which only one amplification primer is immobilized (the other primer usually being present in free solution), it is preferred for the solid support to be provided with both the forward and the reverse primers immobilized. In practice, there will be a “plurality” of identical forward primers and/or a “plurality” of identical reverse primers immobilized on the solid support, since the PCR process requires an excess of primers to sustain amplification. References herein to forward and reverse primers are to be interpreted accordingly as encompassing a “plurality” of such primers unless the context indicates otherwise.

[0245] As will be appreciated by the skilled reader, any given PCR reaction requires at least one type of forward primer and at least one type of reverse primer specific for the template to be amplified. However, in certain aspects the forward and reverse primers may comprise template-specific portions of identical sequence, and may have entirely identical nucleotide sequence and structure (including any non-nucleotide modifications). In other words, it is possible to carry out solid-phase amplification using only one type of primer, and such single-primer methods are encompassed within the scope of the invention. Other aspects may use forward and reverse primers which contain identical template-specific sequences but which differ in some other structural features. For example one type of primer may contain a non-nucleotide modification which is not present in the other.

[0246] In other aspects of the invention the forward and reverse primers may contain template-specific portions of different sequence.

[0247] Amplification primers for solid-phase PCR are preferably immobilized by covalent attachment to the solid support at or near the 5′ end of the primer, leaving the template-specific portion of the primer free for annealing to its cognate template and the 3′ hydroxyl group free for primer extension. Any suitable covalent attachment means known in the art may be used for this purpose. The chosen attachment chemistry will depend on the nature of the solid support, and any derivatization or functionalization applied to it. The primer itself may include a moiety, which may be a non-nucleotide chemical modification, to facilitate attachment. In one particularly preferred aspect the primer may include a sulphur-containing nucleophile, such as phosphorothioate or thiophosphate, at the 5′ end. In the case of solid-supported polyacrylamide hydrogels (as described below), this nucleophile will bind to a “C” group present in the hydrogel. The most preferred means of attaching primers and templates to a solid support is via 5′ phosphorothioate attachment to a hydrogel comprised of polymerized acrylamide and N-(5-bromoacetamidylpentyl)acrylamide (BRAPA).

[0248] The terms “cluster” and “colony” are used interchangeably herein to refer to a discrete site on a solid support comprised of a plurality of identical immobilized nucleic acid strands and a plurality of identical immobilized complementary nucleic acid strands. The term “clustered array” refers to an array formed from such clusters or colonies. In this context the term “array” is not to be understood as requiring an ordered arrangement of clusters.

[0249] The invention also encompasses methods of sequencing the amplified nucleic acids generated by solid-phase amplification. Thus, the invention provides a method of nucleic acid sequencing comprising amplifying a library of nucleic acid templates by the methods of the present disclosure described above, using solid-phase amplification as described above to amplify this library on a solid support, and carrying out a nucleic acid sequencing reaction to determine the sequence of the whole or a part of at least one amplified nucleic acid strand produced in the solid-phase amplification reaction.

[0250] Sequencing, as referred to herein, can be carried out using any suitable “sequencing-by-synthesis” technique, wherein nucleotides are added successively to a free 3′ hydroxyl group, resulting in synthesis of a polynucleotide chain in the 5′ to 3′ direction. The nature of the nucleotide added is preferably determined after each nucleotide addition.

[0251] The initiation point for the sequencing reaction may be provided by annealing of a sequencing primer to a product of the whole genome or solid-phase amplification reaction. In this connection, one or both of the adapters added during formation of the template library may include a nucleotide sequence which permits annealing of a sequencing primer to amplified products derived by whole genome or solid-phase amplification of the template library.

[0252] The products of solid-phase amplification reactions wherein both forward and reverse amplification primers are covalently immobilized on the solid surface are so-called “bridged” structures formed by annealing of pairs of immobilized polynucleotide strands and immobilized complementary strands, both strands being attached to the solid support at the 5′ end. Arrays comprised of such bridged structures provide inefficient templates for nucleic acid sequencing, since hybridization of a conventional sequencing primer to one of the immobilized strands is not favored compared to annealing of this strand to its immobilized complementary strand under standard conditions for hybridization.

[0253] In order to provide more suitable templates for nucleic acid sequencing it is preferred to remove substantially all or at least a portion of one of the immobilized strands in the “bridged” structure in order to generate a template which is at least partially single-stranded. The portion of the template which is single-stranded will thus be available for hybridization to a sequencing primer. The process of removing all or a portion of one immobilized strand in a “bridged” double-stranded nucleic acid structure may be referred to herein as “linearization”.

[0254] Bridged template structures may be linearized by cleavage of one or both strands with a restriction endonuclease or by cleavage of one strand with a nicking endonuclease. Other methods of cleavage can be used as an alternative to restriction enzymes or nicking enzymes, including inter alfa chemical cleavage (e.g. cleavage of a diol linkage with periodate), cleavage of abasic sites by cleavage with endonuclease, or by exposure to heat or alkali, cleavage of ribonucleotides incorporated into amplification products otherwise comprised of deoxyribonucleotides, photochemical cleavage or cleavage of a peptide linker.

[0255] It will be appreciated that a linearization step may not be essential if the solid-phase amplification reaction is performed with only one primer covalently immobilized and the other in free solution.

[0256] In order to generate a linearized template suitable for sequencing it is necessary to remove “unequal” amounts of the complementary strands in the bridged structure formed by amplification so as to leave behind a linearized template for sequencing which is fully or partially single stranded. Most preferably one strand of the bridged structure is substantially or completely removed.

[0257] Following the cleavage step, regardless of the method used for cleavage, the product of the cleavage reaction may be subjected to denaturing conditions in order to remove the portion(s) of the cleaved strand(s) that are not attached to the solid support. Suitable denaturing conditions will be apparent to the skilled reader with reference to standard molecular biology protocols.

[0258] Denaturation (and subsequent re-annealing of the cleaved strands) results in the production of a sequencing template which is partially or substantially single-stranded. A sequencing reaction may then be initiated by hybridization of a sequencing primer to the single-stranded portion of the template.

[0259] Thus, the nucleic acid sequencing reaction may comprise hybridizing a sequencing primer to a single-stranded region of a linearized amplification product, sequentially incorporating one or more nucleotides into a polynucleotide strand complementary to the region of amplified template strand to be sequenced, identifying the base present in one or more of the incorporated nucleotide(s) and thereby determining the sequence of a region of the template strand.

[0260] One preferred sequencing method which can be used in accordance with the invention relies on the use of modified nucleotides that can act as chain terminators. Once the modified nucleotide has been incorporated into the growing polynucleotide chain complementary to the region of the template being sequenced there is no free 3′-OH group available to direct further sequence extension and therefore the polymerase cannot add further nucleotides. Once the nature of the base incorporated into the growing chain has been determined, the 3′ block may be removed to allow addition of the next successive nucleotide. By ordering the products derived using these modified nucleotides it is possible to deduce the DNA sequence of the DNA template. Such reactions can be done in a single experiment if each of the modified nucleotides has attached a different label, known to correspond to the particular base, to facilitate discrimination between the bases added at each incorporation step. Alternatively, a separate reaction may be carried out containing each of the modified nucleotides separately.

[0261] The modified nucleotides may carry a label to facilitate their detection. Preferably this is a fluorescent label. Each nucleotide type may carry a different fluorescent label. However, the detectable label need not be a fluorescent label. Any label can be used which allows the detection of an incorporated nucleotide.

[0262] One method for detecting fluorescently labelled nucleotides comprises using laser light of a wavelength specific for the labelled nucleotides, or the use of other suitable sources of illumination. The fluorescence from the label on the nucleotide may be detected by a CCD camera or other suitable detection means.

[0263] The invention is not intended to be limited to use of the sequencing method outlined above, as essentially any sequencing methodology which relies on successive incorporation of nucleotides into a polynucleotide chain can be used. Suitable alternative techniques include, for example, Pyrosequencing, FISSEQ (fluorescent in situ sequencing), MPSS (massively parallel signature sequencing) and sequencing by ligation-based methods.

### Hybridization

[0264] As used herein, the term “hybridize” is used in its broadest sense to mean the formation of a stable nucleic acid duplex. In one aspect, “stable duplex” means that a duplex structure is not destroyed by a stringent wash under conditions such as, for example, a temperature of either about 5° C. below or about 5° C. above the Tm of a strand of the duplex and low monovalent salt concentration, e.g., less than 0.2 M, or less than 0.1 M or salt concentrations known to those of skill in the art. A duplex can be “perfectly matched”, such that the polynucleotide and/or oligonucleotide strands making up the duplex form a double stranded structure with one another such that every nucleotide in each strand undergoes Watson-Crick base pairing with a nucleotide in the other strand. The term “duplex” comprises, but is not limited to, the pairing of nucleoside analogs, such as deoxyinosine, nucleosides with 2-aminopurine bases, PNAs, and the like, that can be employed. A duplex can comprise at least one mismatch, wherein the term “mismatch” means that a pair of nucleotides in the duplex fail to undergo Watson-Crick bonding.

[0265] As used herein, the term “hybridization conditions,” will typically include salt concentrations of less than about 1 M, more usually less than about 500 mM and even more usually less than about 200 mM. Hybridization temperatures can be as low as 5° C., but are typically greater than 22° C., more typically greater than about 30° C., and often in excess of about 37° C. Hybridizations are usually performed under stringent conditions, e.g., conditions under which a probe will specifically hybridize to its target analyte. Stringent conditions are sequence-dependent and are different in different circumstances. Longer fragments can require higher hybridization temperatures for specific hybridization. As other factors can affect the stringency of hybridization, including base composition and length of the complementary strands, presence of organic solvents and extent of base mismatching, the combination of parameters is more important than the absolute measure of any one alone. Certain hybridization conditions will promote the formation of a duplex between the entire length of a target binding domain and the target analyte. Other hybridization conditions will promote the formation of a duplex only along certain portions of the target binding domain.

### Compositions of the Present Disclosure

[0266] The present disclosure provides a composition comprising any of the probes, extended probes or probe-intermediates described herein.

### Exemplary Embodiments

[0267] Embodiment 1. A method for in situ synthesis of a nucleic acid sequence in a tissue sample, the method comprising:
[0268] a) contacting the tissue sample with at least one probe,
   [0269] wherein the probe comprises a target-binding domain and a target identification domain,
   [0270] wherein the probe comprises a free 3′-OH moiety, and
   [0271] wherein the target-binding domain binds to at least one target molecule at a first location of the tissue sample;
[0272] b) ligating a nucleotide to the free 3′-OH moiety of at least one bound probe by contacting the free 3′-OH moiety with at least one nucleotide-polymerase complex, thereby extending at least one bound probe,
   [0273] wherein the at least one nucleotide-polymerase complex comprises the nucleotide operably linked to a polymerase via a photocleavable linker,
[0274] c) illuminating the first location of the tissue sample with light sufficient to cleave the photocleavable linker of the at least one nucleotide-polymerase complex, thereby releasing the polymerase and exposing a free 3′-OH moiety on the extended at least one bound probe; and
[0275] d) repeating steps (b) and (c) until the nucleic acid sequence has been synthesized.

[0276] Embodiment 2. A method for in situ synthesis of a nucleic acid sequence in a tissue sample, the method comprising:
[0277] a) contacting the tissue sample with at least one probe, wherein the probe comprises a target-binding domain and a target identification domain, wherein the probe comprises a free 3′-OH moiety, and wherein the target-binding domain binds to at least one target molecule located at a first location of the tissue sample;
[0278] b) ligating a nucleotide to the free 3-OH moiety of at least one bound probe by contacting the tissue sample with at least one reversible terminator nucleotide and at least one polymerase, thereby extending the at least one bound probe, wherein the at least one reversible terminator nucleotide comprises the nucleotide operably linked to a 3′ terminator moiety via a photocleavable linker;
[0279] c) illuminating the first location of the tissue sample with light sufficient to cleave the photocleavable linker of the at least one reversible terminator nucleotide, thereby releasing the 3′ terminator moiety and exposing a free 3′-OH moiety on the extended at least one bound probe; and
[0280] d) repeating steps (b) and (c) until the nucleic acid sequence has been synthesized.

[0281] Embodiment 3. The method of embodiment 1 or embodiment 2, wherein the target-binding domain binds to at least one target molecule at an at least second location of the tissue sample, and wherein the method further comprises repeating steps (b) - (d) at the at least second location.

[0282] Embodiment 4. The method of embodiment 3, wherein the nucleic acid sequence synthesized at the first location of the tissue sample is different than the nucleic acid sequence synthesized at the at least second location of the tissue sample.

[0283] Embodiment 5. A method of producing a spatially-resolved profile of the abundance of at least two target analytes in a first and an at least second location of a tissue sample comprising:
[0284] a) contacting the tissue sample with a solution comprising at least two species of probes, the probes comprising a target-binding domain and a target identification domain, wherein each species of probe comprises a unique target-binding domain that binds to one of the at least two target analytes and a unique target identification domain specific for the target analyte, and a free 3′-OH moiety;
[0285] b) ligating a nucleotide to the free 3′-OH moiety of at least one bound probe by contacting the tissue sample with a first plurality of nucleotide-polymerase complexes, thereby extending the barcode domain of the at least one bound probe and forming a spatial barcode domain,
[0286] wherein at least one nucleotide-polymerase complex in the first plurality comprises the nucleotide operably linked to a polymerase via a photocleavable linker;
[0287] c) illuminating at least one location of the tissue sample with light sufficient to cleave the photocleavable linker of the nucleotide-polymerase complexes, thereby releasing the polymerases and exposing a free 3′-OH moiety on the spatial barcode domain at the at least one location of the tissue sample;
[0288] d) ligating a nucleotide to the free 3′-OH moiety of the spatial barcode domain of at least one bound probe at the at least one location illuminated in step (c) by contacting the tissue sample with an additional plurality of nucleotide-polymerase complexes, thereby extending the spatial barcode domain of the at least one bound probe, wherein at least one nucleotide-polymerase complex in the additional plurality comprises the nucleotide operably linked to a polymerase via a photocleavable linker;
[0289] e) repeating steps (c) and (d) until the spatial barcode domain of at least one probe bound to a target analyte in the first location of the tissue sample has been extended such that the spatial barcode domain comprises a unique nucleic acid sequence specific to the first location of the tissue sample, and
[0290] the spatial barcode domain of at least one probe bound to a target analyte in the at least second location of the tissue sample has been extended such that the spatial barcode domain comprises a unique nucleic acid sequence specific to the at least second location of the tissue sample;
[0291] f) collecting the probes bound to target analytes in the tissue sample; and
[0292] g) quantifying via sequencing the probes collected in step (f), thereby determining the abundance of the at least two target analytes in the first and the at least second location of the tissue sample, thereby producing a spatially-resolved profile of the abundance of the at least two target analytes.

[0293] Embodiment 6. A method of producing a spatially-resolved profile of the abundance of at least two target analytes in a first and an at least second location of a tissue sample comprising:
[0294] a) contacting the tissue sample with a solution comprising at least two species of probes, the probes comprising a target-binding domain and a target identification domain, wherein each species of probe comprises a unique target-binding domain that binds to one of the at least two target analytes and a unique target identification domain specific for the target analyte, and a free 3′-OH moiety;
[0295] b) ligating a nucleotide to the free -OH moiety of the barcode domain of at least one bound probe by contacting the tissue sample with a first plurality of reversible terminator nucleotides and a first plurality of polymerases, thereby extending the at least one bound probe and forming a spatial barcode domain, wherein at least one reversible terminator nucleotide in the first plurality comprises the nucleotide operably linked to a 3′ terminator moiety via a photocleavable linker;
[0296] c) illuminating at least one location of the tissue sample with light sufficient to cleave the photocleavable linker of the reversible terminator nucleotides, thereby releasing the reversible 3′ terminator moieties and exposing a free 3′-OH moiety on the spatial barcode domain at the at least one location of the tissue sample;
[0297] d) ligating a nucleotide to the free 3′-OH moiety of the spatial barcode domain of at least one bound probe at the at least one location illuminated in step (c) by contacting the tissue sample with an additional plurality of reversible terminator nucleotides and an additional plurality of polymerases, thereby extending the spatial barcode domain of the at least one bound probe,
[0298] wherein at least one reversible terminator nucleotide in the additional plurality comprises the nucleotide operably linked to a reversible 3′ terminator moiety via a photocleavable linker;
[0299] e) repeating steps (c) and (d) until the spatial barcode domain of at least one probe bound to a target analyte in the first location of the tissue sample has been extended such that the spatial barcode domain comprises a unique nucleic acid sequence specific to the first location of the tissue sample, and
[0300] the spatial barcode domain of at least one probe bound to a target analyte in the at least second location of the tissue sample has been extended such that the spatial barcode domain comprises a unique nucleic acid sequence specific to the at least second location of the tissue sample;
[0301] f) collecting the probes bound to target analytes in the tissue sample; and
[0302] g) quantifying via sequencing the probes collected in step (f), thereby determining the abundance of the at least two target analytes in the first and the at least second location of the tissue sample, thereby producing a spatially-resolved profile of the abundance of the at least two target analytes.

[0303] Embodiment 7. The method of embodiment 5 or embodiment 6, further comprising comparing the abundance of the at least two target analytes in the first location of the tissue sample and the at least two target analytes in the at least second location of the tissue sample.

[0304] Embodiment 8. The method of any of the preceding embodiments, wherein the polymerase is terminal deoxynucleotidyl transferase or a portion thereof.

[0305] Embodiment 9. The method of any of the preceding embodiments, wherein the at least one reversible terminator nucleotide comprises 3′-O-(2-nitrobenzyl)-dATP, 3′-O-(2-nitrobenzyl)-dCTP, 3′-O-(2-nitrobenzyl)-dGTP or 3′-O-(2-nitrobenzyl)-dTTP.

[0306] Embodiment 10. The method of any of the preceding embodiments, wherein the 3′ terminator moiety comprises 2-nitrobenzyl.

[0307] Embodiment 11. The method of any one of the preceding embodiments, wherein the probes further comprise a unique molecular identifier.

[0308] Embodiment 12. The method of any one of the preceding embodiments, wherein the unique molecular identifier is at least about 14 nucleotides in length.

[0309] Embodiment 13. The method of any one of the preceding embodiments, wherein the probes further comprise an amplification primer binding site.

[0310] Embodiment 14. The method of any one of the preceding embodiments, wherein the amplification primer binding site is at least about 24 nucleotides in length.

[0311] Embodiment 15. The method of any one of the preceding embodiments, wherein the probes further comprise a constant region.

[0312] Embodiment 16. The method of any one of the preceding embodiments, wherein the constant region is at least about 12 to at least about 20 nucleotides in length.

[0313] Embodiment 17. The method of any one of the preceding embodiments, wherein the probes comprise, from 5′ to 3′, the target binding domain, followed by the amplification primer binding site, followed by the unique molecular identifier, followed by the target identification domain, followed by the constant region.

[0314] Embodiment 18. The method of any one of the preceding embodiments, wherein the spatial barcode domain of at least one probe bound to a target analyte in the first location of the tissue sample comprises a unique spatial identifier sequence specific to the first location of the tissue sample.

[0315] Embodiment 19. The method of any one of the preceding embodiments, wherein the spatial barcode domain of at least one probe bound to a target analyte in the at least second location of the tissue sample comprises a unique spatial identifier sequence specific to the at least second location of the tissue sample.

[0316] Embodiment 20. The method of any one of the preceding embodiments, wherein the spatial identifier sequence comprises at least about 20 nucleotides.

[0317] Embodiment 21. The method of any one of the preceding embodiments, wherein the spatial identifier sequence comprises at least four spatial identification domains.

[0318] Embodiment 22. The method of any one of the preceding embodiments, wherein each of the at least four spatial identification domains comprise the same number of nucleotides.

[0319] Embodiment 23. The method of any one of the preceding embodiments, wherein at least one of the at least four spatial identifications domains comprise a different number of nucleotides as compared to another spatial identification domain within the same spatial barcode.

[0320] Embodiment 24. The method of any one of the preceding embodiments, wherein each spatial identification domain comprises about 1 to about 4 nucleotides.

[0321] Embodiment 25. The method of any one of the preceding embodiments, wherein each spatial identification domain comprises about 4 nucleotides.

[0322] Embodiment 26. The method of any one of the preceding embodiments, wherein each of the at least four spatial identification domains comprise the same nucleotide at the 3′ terminus

[0323] Embodiment 27. The method of any one of the preceding embodiments, wherein the method further comprises, after step (e) and prior to step (f), repeating steps (c) and (d) to extend the spatial barcode domain in each location of the tissue sample such that the spatial barcode domain comprises, at the 3′ end, a delimiting domain.

[0324] Embodiment 28. The method of any one of the preceding embodiments, wherein the method further comprises, after step (e) and prior to step (f), extending the spatial barcode domain in each location of the tissue sample such that the spatial barcode domain comprises a polyT domain.

[0325] Embodiment 29. The method of any one of the preceding embodiments, wherein the method further comprises, after step (e) and prior to step (f):
[0326] (i) repeating steps (c) and (d) to extend the spatial barcode domain in each location of the tissue sample such that the spatial barcode domain comprises, a delimiting domain; and
[0327] (ii) extending the spatial barcode domain in each location of the tissue sample such that the spatial barcode domain comprises a polyT domain.

[0328] Embodiment 30. The method of any one of the preceding embodiments, wherein the delimiting domain is at least about 4 to at least about 6 nucleotides in length.

[0329] Embodiment 31. The method of any one of the preceding embodiments, wherein the sequence of the delimiting domain is the same for every spatial barcode in the sample.

[0330] Embodiment 32. The method of any one of the preceding embodiments, wherein the polyT domain comprises at least about 14 nucleotides.

[0331] Embodiment 33. The method of any one of the preceding embodiments, wherein the illumination in step (c) is provided by a light source selected from the group consisting of an arc-lamp, a laser, a focused UV light source, and light emitting diode.

[0332] Embodiment 34. The method of any one of the preceding embodiments, wherein the laser is an infrared laser.

[0333] Embodiment 35. The method of any one of the preceding embodiments, wherein the illumination in step (c) is provided by a two-photon excitation microscope.

[0334] Embodiment 36. The method of any one of the preceding embodiments, wherein the first location of the tissue sample and the second location of the tissue sample are no more than about 500 nm in the x and/or y direction and no more than about 1500 nm in the z direction.

[0335] Embodiment 37. The method of any one of the preceding embodiments, wherein the first location of the tissue sample and the at least second location of the tissue sample are subcellular.

[0336] Embodiment 38. The method of any one of the preceding embodiments, wherein the first location of the tissue sample and the at least second location of the tissue sample each comprise no more than one cell.

[0337] Embodiment 39. The method of any one of the preceding embodiments, wherein the first location of the tissue sample and the at least second location of the tissue sample each comprise no more than ten cells.

[0338] Embodiment 40. The method of any one of the preceding embodiments, wherein each cell within the first location of the tissue sample and the at least second location of the tissue sample are individually automatically identified and encoded.

[0339] Embodiment 41. The method of any of the preceding embodiments, the method further comprising prior to step (a), subjecting the tissue sample to ddTTP (dideoxthymidine-triphosphate) termination.

[0340] Embodiment 42. The method of any of the preceding embodiments, wherein subjecting the tissue sample to ddTTP termination comprises contacting the tissue sample with ddTTP and TdT.

[0341] Embodiment 43. The method of any one of the preceding embodiments, the method further comprising after step (f) and prior to step (g), amplifying the collected probes.

[0342] Embodiment 44. The method of any one of the preceding embodiments, wherein amplifying the collected probes comprises the use of a first amplification primer and a second amplification primer, wherein
[0343] the first amplification primer comprises a first flow cell adapter sequence, a first NGS index sequence and a first sequencing primer binding site, and
[0344] the second amplification primer comprises a second flow cell adapter sequence, a second NGS index sequence and second sequencing primer binding site.

[0345] Embodiment 45. The method of any one of the preceding embodiments, wherein at least one of the first and the second amplification primers comprises a nucleic acid sequence that is complementary to the delimiting sequence and/or the polyT domain.

### EXAMPLES

### Example 1—Amplification of the Probes of the Present Disclosure

[0346] The following are a set of experiment to test the amplification of the probes of the present disclosure.

[0347] In a first experiment, the probe to be amplified was comprised of a target-binding domain and an amplification primer binding site, as shown in FIG. 15. The first amplification primer comprised a sequence of the target-binding domain and the second amplification primer comprised a sequence complementary to the amplification primer binding site on the probe, as shown in FIG. 15. These two amplification primers were then used to amplify the probe, with an expected amplicon of 61 bp. FIG. 16 shows the results of the amplification experiment as analyzed using gel electrophoresis. In the first five lanes were control amplification reactions that contained no probes (NTC, non-template control) that had been incubated with TdT and dTTP and then added to 5 ng of human DNA. In lanes 6-10 were amplification reactions that contained 25 attomols of probes that had been incubated with TdT and dTTP and then added to 5 ng of human DNA. The control reactions yielded no amplification products, while the amplification reactions with the probes yielded amplification products at the expected molecular weight.

[0348] In a second experiment, the probe to be amplified was comprised of a target-binding domain and an amplification primer binding site, as shown in FIG. 17. The first amplification primer comprised a flow cell adapter sequence, an NGS index sequence, a sequencing primer binding site and a sequence of the amplification primer binding site of the probe, as shown in FIG. 17. The second amplification primer comprised a flow cell adapter sequence, an NGS index sequence, a sequencing primer binding site and a polyA domain that was able to hybridize to the polyT domain added to the end of the probe by TdT extension. These two amplification primers were then used to amplify the probe, with an expected amplicon of 194 bp. FIG. 18 shows the results of the amplification experiment as analyzed using gel electrophoresis. 25 attomols of the probes were first incubated with dTTP in the presence or absence of TdT to perform TdT mediated, polyT extension. These reactions were then added separately to 5 ng of 300 bp human gDNA and amplified using the amplification primers. Lanes 1-5 of the gel contain the amplification reactions using the probes that were not treated with TdT, and thus should have no polyT domains. As expected, these probes were not amplified as the second amplification primer was unable to bind to the lack of a polyT domain. Lanes 6-8 and 10 of the gel contain the amplification reactions using the probes treated with TdT, and thus should have a polyT domain. These amplification reactions yielded products at the expected molecular weight, demonstrating that the polyT domain can be used to specifically amplify probes of the present disclosure that had been extended by TdT.

[0349] Taken together, these results indicate that the probes of the present disclosure can be amplified using the amplification primers and methods described herein

### Example 2—in Situ TdT Synthesis and Probe/DNA Recover

[0350] The following is a set of experiments to test the recovery of DNA from tissue samples that have been incubated with TdT and dTTP.

[0351] In a first set of control experiments, fresh and four-day-old tissue samples were subjected to proteinase K digestion at 56° C. for 1 hour followed by further digestion at 90° C. for 15 minutes. DNA extracted from the tissue samples and subjected to Qubit analysis to determine the amount of double stranded DNA of high molecular weight (dsDNA _highMW), double stranded DNA of low molecular weight (dsDNA_lowMW), single stranded DNA of high molecular weight (ssDNA_highMW) and single-stranded DNA of low molecular weight (ssDNA_lowMW). The results of this analysis are shown on the left side of the bar graph in FIG. 19 (labeled control experiments). As show in FIG. 19, high molecular weight fractions (>500bp) were observed for both dsDNA and ssDNA, and ssDNA accounted for about 80% of the DNA recovered.

[0352] In a second set of experiments, tissue samples were incubated with probes of the present disclosure in combination with ddTTP-terminated blocking DNA overnight. The tissue samples were then washed and dehydrated. The tissue samples were then incubated with dTTP in the presence (TdT_tissue) or the absence (noTdT_tissue) of TdT to allow for polyT tailing by TdT. After the tailing reaction, the tissue samples were subjected to proteinase K digestion at 56° C. for 1 hour followed by further digestion at 90° C. for 15 minutes. DNA extracted from the tissue samples and subjected to Qubit analysis to determine the amount of double stranded DNA of high molecular weight (dsDNA _highMW), double stranded DNA of low molecular weight (dsDNA_lowMW), single stranded DNA of high molecular weight (ssDNA _highMW) and single-stranded DNA of low molecular weight (ssDNA_lowMW). The results of this analysis are shown on the right side of the bar graph in FIG. 19 (tailing experiments). As shown in FIG. 19, the tissue sample that had been incubated TdT yielded increased amounts of high molecular weight DNA, indicating the polyT tailing reaction was successful. In fact, the on-tissue tailing resulted in >35% of DNA having a polyT tail with an average polyT length of > 500 nucleotides. The low and high molecular weight DNA fractions were then further analyzed to determine if they contained the probes that were contacted to the tissue sample. Amplification using amplification primers specific to the probes indicated that the probes were present in the low molecular weight fractions of DNA. Moreover, more probes were recovered in the tissue sample that was subjected to TdT tailing.

[0353] Taken together, these results indicate that TdT can be used to extend polynucleotides in situ within a tissue sample, and that these extended polynucleotides can be subsequently collected. The results also indicate that the addition of polyT tails on bound probes can increase the recovery of the probes.

### Example 3 - in Situ DNA Synthesis Using TdT

[0354] The following example describes a set of experiments that demonstrate that the TdT enzyme can be used to perform in situ DNA synthesis within a tissue sample.

[0355] FFPE tissue samples (TMA tonsil or 3-cell-pellet array, 5 µm thickness on silane coated cover glass) were prepared using the following two-day protocol:
[0356] Day 1:
   [0357] 1) Samples were baked at 60° C. and then subjected to deparaffinization via xylene and EtOH;
   [0358] 2) Samples were heated at 100° C. and treated with protease;
   [0359] 3) Fiducial markers were deposited onto the samples;
   [0360] 4) Samples were fixed/cross-linked using NBF, Tris-Glycine and Sulfo-NHS acetate (to block silane); and
   [0361] 5) Samples were incubated overnight in the presence or absence of probes along with 100 µg/mL carrier DNA (<2k bp).
[0362] Day 2:
   [0363] 6) samples were washed at 37° C. or room temperature using 2x saline-sodium citrate, 50% formamide, with or without 0.1% Tween20;
   [0364] 7) samples were incubated with 75 µl of TdT tailing mix (25 nmol dTTP with or without 150 units of TdT) for 1.5 hours at 37° C., after which the reaction was quenched by the addition of 0.2 M EDTA;
   [0365] 8) samples were then washed three times with EtOH, air dried and stored at 4° C.

[0366] To determine whether the TdT enzyme added poly-T tails onto the probes bound within the samples, the samples as prepared above were stained with 100 nM of Alexa546-labeled, poly A oligonucleotides comprising 15 “A” nucleotides. These labeled polyA oligonucleotides should bind to any polyT tails added by the TdT enzyme and be detectable under a fluorescent microscope. After initial detection of the polyA oligonucleotides, the samples were also treated with a 0.0033x Sodium Chloride-Sodium Phosphate-EDTA (SSPE) wash to strip the polyA oligonucleotides from the samples. Cells were stained with the polyA15 oligonucleotide regardless of whether the cells had been treated with the probes. Without wishing to be bound by theory, this most likely indicates that the TdT enzyme added polyT tails on the blocking DNA and endogenous nuclear DNA, in addition to the ISH probes. Moreover, the SSPE successfully striped a majority of the labeled polyA oligonucleotides from the cells.

[0367] In a similar experiment as described above, cells were stained with 20 nM of the labeled polyA oligonucleotide and three different sample types were tested (CCRF-CEM cells, DAUDI cells and MDA-MB-468 cells). All three cell types that were treated with the probes and TdT were stained with the polyA oligonucleotide, indicating that the TdT treatment resulted in the addition of polyT tails to DNA molecules within the cells. Control experiments were also performed wherein the same three types of samples were treated with the probes (“ISH probes”) but were not treated with TdT. These control samples exhibited low to no staining with the labeled polyA oligonucleotide, indicating that the signal observed in the experiments described above is due to polyT tailing by TdT.

[0368] Taken together, these results indicate that TdT can perform in situ DNA synthesis in a tissue sample.

### Example 4 - xGen Hybridization Capture-Based Purification

[0369] The following are non-limiting examples of xGen hybridization capture-based purifications that can be used in the methods of the present disclosure.

[0370] An xGen hybridization capture-based purification can comprise:
[0371] a) incubating tissue sample lysate (crude or Ampure purified) with capture probes comprising at least one sequence complementary to probes of the present disclosure and at least one biotin moiety at 95° C. for 30 seconds in 5× SSPE, followed by an incubation at 43° C. for one hour in 5× SSPE;
[0372] b) incubating the solution from step (a) three times with streptavidin-coated beads at 38° C. for 10 minutes in 5x SSPE;
[0373] c) washing the beads with 5x SSPE twice at 43° C. to remove unbound molecules;
[0374] d) further washing the beads with 0.1× SSPE three times at room temperature to reduce non-specific binding; and
[0375] e) eluting the bound probes from the beads by incubating the beads in H₂O at 45° C. for ten minutes.

[0376] An xGen hybridization capture-based purification can comprise:
[0377] a) incubating 25 µl of tissue lysate (about 75 to 125 ng/µl total DNA) or mock lysate (200 ng huDNA +/- 25 amol probes) with 200 pmol of capture probes in a total of 35 µl of 5xSSPE buffer at room temperature for 5 minutes;
[0378] b) further incubating the solution from step (a) at 95° C. for 30 seconds;
[0379] c) further incubating the solution from step (b) at 43° C. for 1 hour;
[0380] d) mixing the solution from step (c) with 110 µl (1.1 mg) of washed, magnetic streptavidin-coated beads, wherein the streptavidin-coated beads were washed with twice with 1 mL of 50° C. 5x SSPE;
[0381] e) pipetting the solution from step (d) up and down 10 times;
[0382] f) incubating the solution from step (e) at 38° C. for 10 minutes three times, wherein between each 10 minute incubation, the solution is gently vortexed to resuspend the beads;
[0383] g) harvesting the beads on a magnet;
[0384] h) washing the beads twice with 100 µl of 5x SSPE incubated at 43° C. for five minutes each wash;
[0385] i) resuspending the washed beads in 100 µl of 0.1× SSPE;
[0386] j) further washing the beads three times with 1 mL of 0.1× SSPE;
[0387] k) resuspending the washed beads in 100 µl of 0.1× SSPE;
[0388] l) harvesting the beads on a magnet;
[0389] m) resuspending the beads in 25 µl of H₂O and incubate at 45° C. for 10 minutes to elute the bound probes from the beads
[0390] n) optionally, adding carrier DNA to each purified elute to prevent loss of probes due to non-specific absorption onto the tube.

What is claimed is:

1. A method of producing a spatially-resolved profile of the abundance of at least two target analytes in a first and an at least second location of a tissue sample comprising:
a) contacting the tissue sample with a solution comprising at least two species of probes, the probes comprising a target-binding domain and a target identification domain,
wherein each species of probe comprises a unique target-binding domain that binds to one of the at least two target analytes and a unique target identification domain specific for the target analyte, and a free 3′-OH moiety;
b) ligating a nucleotide to the free 3′-OH moiety of at least one bound probe by contacting the tissue sample with a first plurality of nucleotide-polymerase complexes, thereby extending the barcode domain of the at least one bound probe and forming a spatial barcode domain,
wherein at least one nucleotide-polymerase complex in the first plurality comprises the nucleotide operably linked to a polymerase via a photocleavable linker;
c) illuminating at least one location of the tissue sample with light sufficient to cleave the photocleavable linker of the nucleotide-polymerase complexes, thereby releasing the polymerases and exposing a free 3′-OH moiety on the spatial barcode domain at the at least one location of the tissue sample;
d) ligating a nucleotide to the free 3′-OH moiety of the spatial barcode domain of at least one bound probe at the at least one location illuminated in step (c) by contacting the tissue sample with an additional plurality of nucleotide-polymerase complexes, thereby extending the spatial barcode domain of the at least one bound probe,
wherein at least one nucleotide-polymerase complex in the additional plurality comprises the nucleotide operably linked to a polymerase via a photocleavable linker;
e) repeating steps (c) and (d) until
the spatial barcode domain of at least one probe bound to a target analyte in the first location of the tissue sample has been extended such that the spatial barcode domain comprises a unique nucleic acid sequence specific to the first location of the tissue sample, and
the spatial barcode domain of at least one probe bound to a target analyte in the at least second location of the tissue sample has been extended such that the spatial barcode domain comprises a unique nucleic acid sequence specific to the at least second location of the tissue sample;
f) collecting the probes bound to target analytes in the tissue sample; and
g) quantifying via sequencing the probes collected in step (f), thereby determining the abundance of the at least two target analytes in the first and the at least second location of the tissue sample, thereby producing a spatially-resolved profile of the abundance of the at least two target analytes.

2. A method of producing a spatially-resolved profile of the abundance of at least two target analytes in a first and an at least second location of a tissue sample comprising:
a) contacting the tissue sample with a solution comprising at least two species of probes, the probes comprising a target-binding domain and a target identification domain,
wherein each species of probe comprises a unique target-binding domain that binds to one of the at least two target analytes and a unique target identification domain specific for the target analyte, and a free 3′-OH moiety;
b) ligating a nucleotide to the free 3′-OH moiety of the barcode domain of at least one bound probe by contacting the tissue sample with a first plurality of reversible terminator nucleotides and a first plurality of polymerases, thereby extending the at least one bound probe and forming a spatial barcode domain,
wherein at least one reversible terminator nucleotide in the first plurality comprises the nucleotide operably linked to a 3′ terminator moiety via a photocleavable linker;
c) illuminating at least one location of the tissue sample with light sufficient to cleave the photocleavable linker of the reversible terminator nucleotides, thereby releasing the reversible 3′ terminator moieties and exposing a free 3′}}}}}}}}}}}}}}}}-OH moiety on the spatial barcode domain at the at least one location of the tissue sample;
d) ligating a nucleotide to the free 3′-OH moiety of the spatial barcode domain of at least one bound probe at the at least one location illuminated in step (c) by contacting the tissue sample with an additional plurality of reversible terminator nucleotides and an additional plurality of polymerases, thereby extending the spatial barcode domain of the at least one bound probe,
wherein at least one reversible terminator nucleotide in the additional plurality comprises the nucleotide operably linked to a reversible 3′ terminator moiety via a photocleavable linker;
e) repeating steps (c) and (d) until
the spatial barcode domain of at least one probe bound to a target analyte in the first location of the tissue sample has been extended such that the spatial barcode domain comprises a unique nucleic acid sequence specific to the first location of the tissue sample,
the spatial barcode domain of at least one probe bound to a target analyte in the at least second location of the tissue sample has been extended such that the spatial barcode domain comprises a unique nucleic acid sequence specific to the at least second location of the tissue sample;
f) collecting the probes bound to target analytes in the tissue sample; and
g) quantifying via sequencing the probes collected in step (f), thereby determining the abundance of the at least two target analytes in the first and the at least second location of the tissue sample, thereby producing a spatially-resolved profile of the abundance of the at least two target analytes.

3. The method of claim 1 or claim 2, further comprising comparing the abundance of the at least two target analytes in the first location of the tissue sample and the at least two target analytes in the at least second location of the tissue sample.

4. The method of any of the preceding claims, wherein the polymerase is terminal deoxynucleotidyl transferase or a biologically-active portion thereof.

5. The method of any of the preceding claims, wherein
(2-nitrobenzyl)-dCTP, 3′-O-(2-nitrobenzyl)-dGTP or 3′-O-(2-nitrobenzyl)-dTTP; or
(b) the 3′ terminator moiety comprises 2-nitrobenzyl.

6. The method of any one of the preceding claims, wherein the probes further comprise a unique molecular identifier, preferably wherein the unique molecular identifier is at least about 14 nucleotides in length.

7. The method of any one of the preceding claims, wherein the probes further comprise an amplification primer binding site, preferably wherein the amplification primer binding site is at least about 24 nucleotides in length.

8. The method of any one of the preceding claims, wherein the probes further comprise a constant region, preferably wherein the constant region is at least about 12 to at least about 20 nucleotides in length.

9. The method of any one of the preceding claims, wherein the probes comprise, from 5′ to 3′, the target binding domain, followed by the amplification primer binding site, followed by the unique molecular identifier, followed by the target identification domain, followed by the constant region.

10. The method of any one of the preceding claims, wherein the spatial barcode domain of at least one probe bound to a target analyte in the first location of the tissue sample comprises a unique spatial identifier sequence specific to the first location of the tissue sample, and the spatial barcode domain of at least one probe bound to a target analyte in the at least second location of the tissue sample comprises a unique spatial identifier sequence specific to the at least second location of the tissue sample.

11. The method of any one of the preceding claims, wherein the spatial identifier sequence comprises at least about 20 nucleotides.

12. The method of any one of the preceding claims, wherein the spatial identifier sequence comprises at least four spatial identification domains, preferably wherein:
(a) each of the at least four spatial identification domains comprise the same number of nucleotides, preferably wherein each spatial identification domain comprises about 1 to about 4 nucleotides, preferably wherein each spatial identification domain comprises about 4 nucleotides; or
(b) at least one of the at least four spatial identifications domains comprise a different number of nucleotides as compared to another spatial identification domain within the same spatial barcode.

13. The method of any one of the preceding claims, wherein each of the at least four spatial identification domains comprise the same nucleotide at the 3′ terminus.

14. The method of any one of the preceding claims, wherein the method further comprises, after step (e) and prior to step (f), repeating steps (c) and (d) to extend the spatial barcode domain in each location of the tissue sample such that the spatial barcode domain comprises, at the 3′ end, a delimiting domain.

15. The method of any one of the preceding claims, wherein the method further comprises, after step (e) and prior to step (f), extending the spatial barcode domain in each location of the tissue sample such that the spatial barcode domain comprises a polyT domain.

16. The method of any one of the preceding claims, wherein the method further comprises, after step (e) and prior to step (f):
(i) repeating steps (c) and (d) to extend the spatial barcode domain in each location of the tissue sample such that the spatial barcode domain comprises, a delimiting domain; and
(ii) extending the spatial barcode domain in each location of the tissue sample such that the spatial barcode domain comprises a polyT domain.

17. The method of any one of the preceding claims, wherein
(a) the delimiting domain is at least about 4 to at least about 6 nucleotides in length; or
(b) the sequence of the delimiting domain is the same for every spatial barcode in the sample.

18. The method of any one of the preceding claims, wherein the polyT domain comprises at least about 14 nucleotides.

19. The method of any one of the preceding claims, wherein the illumination in step (c) is provided by a light source selected from the group consisting of an arc-lamp, a laser, a focused UV light source, and light emitting diode, preferably wherein the laser is an infrared laser.

20. The method of any one of the preceding claims, wherein the illumination in step (c) is provided by a two-photon excitation microscope.

21. The method of any one of the preceding claims, wherein the first location of the tissue sample and the second location of the tissue sample are no more than about 500 nm in the x and/or y direction and no more than about 1500 nm in the z direction.

22. The method of any one of the preceding claims, wherein the first location of the tissue sample and the at least second location of the tissue sample
(a) are subcellular;
(b) each comprise no more than one cell; or
(c) each comprise no more than ten cells.

23. The method of any of the preceding claims, the method further comprising prior to step (a), subjecting the tissue sample to ddTTP (dideoxthymidine-triphosphate) termination, preferably wherein subjecting the tissue sample to ddTTP termination comprises contacting the tissue sample with ddTTP and TdT.

24. The method of any one of the preceding claims, the method further comprising after step (f) and prior to step (g), amplifying the collected probes, preferably wherein amplifying the collected probes comprises the use of a first amplification primer and a second amplification primer, wherein
the first amplification primer comprises a first flow cell adapter sequence, a first NGS index sequence and a first sequencing primer binding site, and
the second amplification primer comprises a second flow cell adapter sequence, a second NGS index sequence and second sequencing primer binding site.

25. The method of any one of the preceding claims, wherein at least one of the first and the second amplification primers comprises a nucleic acid sequence that is complementary to the delimiting sequence and/or the polyT domain.

The application's sequence listing, which the Patent Office published only in electronic form, follows.

SEQUENCE LISTING (10412 sequences)

SEQ ID NO: 1 - protein, 510 aa, Artificial Sequence
  Synthetic Sequence
MDPLQAVHLGPRKKRPRQLGTPVASTPYDIRFRDLVLFILEKKMGTTRRAFLMELARRKGFRVENELSDSVTHIVAENNSGSDVLEWLQLQNIKASSELELLDISWLIECMGAGKPVEMMGRHQLVVNRNSSPSPVPGSQNVPAPAVKKISQYACQRRTTLNNYNQLFTDALDILAENDELRENEGSCLAFMRASSVLKSLPFPITSMKDTEGIPCLGDKVKSIIEGIIEDGESSEAKAVLNDERYKSFKLFTSVFGVGLKTAEKWFRMGFRTLSKIQSDKSLRFTQMQKAGFLYYEDLVSCVNRPEAEAVSMLVKEAVVTFLPDALVTMTGGFRRGKMTGHDVDFLITSPEATEDEEQQLLHKVTDFWKQQGLLLYCDILESTFEKFKQPSRKVDALDHFQKCFLILKLDHGRVHSEKSGQQEGKGWKAIRVDLVMCPYDRRAFALLGWTGSRQFERDLRRYATHERKMMLDNHALYDRTKRVFLEAESEEEIFAHLGLDYIEPWERNA

SEQ ID NO: 2 - protein, 379 aa, Artificial Sequence
  Synthetic Sequence
SPSPVPGSQNVPAPAVKKISQYACQRRTTLNNYNQLFTDALDILAENDELRENEGSCLAFMRASSVLKSLPFPITSMKDTEGIPCLGDKVKSIIEGIIEDGESSEAKAVLNDERYKSFKLFTSVFGVGLKTAEKWFRMGFRTLSKIQSDKSLRFTQMQKAGFLYYEDLVSCVNRPEAEAVSMLVKEAVVTFLPDALVTMTGGFRRGKMTGHDVDFLITSPEATEDEEQQLLHKVTDFWKQQGLLLYCDILESTFEKFKQPSRKVDALDHFQKCFLILKLDHGRVHSEKSGQQEGKGWKAIRVDLVMCPYDRRAFALLGWTGSRQFERDLRRYATHERKMMLDNHALYDRTKRVFLEAESEEEIFAHLGLDYIEPWERNA

SEQ ID NO: 3 - protein, 379 aa, Artificial Sequence
  Synthetic Sequence
SPSPVPGSQNVPAPAVKKISQYACQRRTTLNNYNQLFTDALDILAENDELRENEGSALAFMRASSVLKSLPFPITSMKDTEGIPSLGDKVKSIIEGIIEDGESSEAKAVLNDERYKSFKLFTSVFGVGLKTAEKWFRMGFRTLSKIQSDKSLRFTQMQKAGFLYYEDLVSAVNRPEAEAVSMLVKEAVVTFLPDALVTMTGGFRRGKMTGHDVDFLITSPEATEDEEQQLLHKVTDFWKQQGLLLYADILESTFEKFKQPSRKVDALDHFQKCFLILKLDHGRVHSEKSGQQEGKGWKAIRVDLVMSPYDRRAFALLGWTGSRQFERDLRRYATHERKMMLDNHALYDRTKRVFLEAESEEEIFAHLGLDYIEPWERNA

SEQ ID NO: 4 - protein, 379 aa, Artificial Sequence
  Synthetic Sequence
SPSPVPGSQNVPAPAVKKISQYACQRRTTLNNYNQLFTDALDILAENDCLRENEGSALAFMRASSVLKSLPFPITSMKDTEGIPSLGDKVKSIIEGIIEDGESSEAKAVLNDERYKSFKLFTSVFGVGLKTAEKWFRMGFRTLSKIQSDKSLRFTQMQKAGFLYYEDLVSAVNRPEAEAVSMLVKEAVVTFLPDALVTMTGGFRRGKMTGHDVDFLITSPEATEDEEQQLLHKVTDFWKQQGLLLYADILESTFEKFKQPSRKVDALDHFQKCFLILKLDHGRVHSEKSGQQEGKGWKAIRVDLVMSPYDRRAFALLGWTGSRQFERDLRRYATHERKMMLDNHALYDRTKRVFLEAESEEEIFAHLGLDYIEPWERNA

SEQ ID NO: 5 - protein, 379 aa, Artificial Sequence
  Synthetic Sequence
SPSPVPGSQNVPAPAVKKISQYACQRRTTLNNYNQLFTDALDILAENDELRENEGSCLAFMRASSVLKSLPFPITSMKDTEGIPSLGDKVKSIIEGIIEDGESSEAKAVLNDERYKSFKLFTSVFGVGLKTAEKWFRMGFRTLSKIQSDKSLRFTQMQKAGFLYYEDLVSAVNRPEAEAVSMLVKEAVVTFLPDALVTMTGGFRRGKMTGHDVDFLITSPEATEDEEQQLLHKVTDFWKQQGLLLYADILESTFEKFKQPSRKVDALDHFQKCFLILKLDHGRVHSEKSGQQEGKGWKAIRVDLVMSPYDRRAFALLGWTGSRQFERDLRRYATHERKMMLDNHALYDRTKRVFLEAESEEEIFAHLGLDYIEPWERNA

SEQ ID NO: 6 - protein, 379 aa, Artificial Sequence
  Synthetic Sequence
SPSPVPGSQNVPAPAVKKISQYACQRRTTLNNYNQLFTDALDILAENDELRENEGSALAFMRASSVLKSLPFPITSMKDTEGIPSLGDKVKSIIEGIIEDGESSEAKAVLNDERYKSFKLFCSVFGVGLKTAEKWFRMGFRTLSKIQSDKSLRFTQMQKAGFLYYEDLVSAVNRPEAEAVSMLVKEAVVTFLPDALVTMTGGFRRGKMTGHDVDFLITSPEATEDEEQQLLHKVTDFWKQQGLLLYADILESTFEKFKQPSRKVDALDHFQKCFLILKLDHGRVHSEKSGQQEGKGWKAIRVDLVMSPYDRRAFALLGWTGSRQFERDLRRYATHERKMMLDNHALYDRTKRVFLEAESEEEIFAHLGLDYIEPWERNA

SEQ ID NO: 7 - protein, 379 aa, Artificial Sequence
  Synthetic Sequence
SPSPVPGSQNVPAPAVKKISQYACQRRTTLNNYNQLFTDALDILAENDELRENEGSALAFMRASSVLKSLPFPITSMKDTEGIPSLGDKVKSIIEGIIEDGESSEAKAVLNDERYKSFKLFTSVFGVGLKTAEKWFRMGFRTLSKIQSDKSLRFTQMQKAGFLYYEDLVSCVNRPEAEAVSMLVKEAVVTFLPDALVTMTGGFRRGKMTGHDVDFLITSPEATEDEEQQLLHKVTDFWKQQGLLLYADILESTFEKFKQPSRKVDALDHFQKCFLILKLDHGRVHSEKSGQQEGKGWKAIRVDLVMSPYDRRAFALLGWTGSRQFERDLRRYATHERKMMLDNHALYDRTKRVFLEAESEEEIFAHLGLDYIEPWERNA

SEQ ID NO: 8 - DNA, 10 bp, Artificial Sequence
  Synthetic Sequence
gaatgcacga

SEQ ID NO: 9 - DNA, 10 bp, Artificial Sequence
  Synthetic Sequence
aagactatag

SEQ ID NO: 10 - DNA, 10 bp, Artificial Sequence
  Synthetic Sequence
tcggcagcaa

SEQ ID NO: 11 - DNA, 10 bp, Artificial Sequence
  Synthetic Sequence
ctaatgatgg

SEQ ID NO: 12 - DNA, 10 bp, Artificial Sequence
  Synthetic Sequence
ggttgcctct

SEQ ID NO: 13 - DNA, 10 bp, Artificial Sequence
  Synthetic Sequence
cgcacatggc

SEQ ID NO: 14 - DNA, 10 bp, Artificial Sequence
  Synthetic Sequence
cggcaatgga

SEQ ID NO: 15 - DNA, 10 bp, Artificial Sequence
  Synthetic Sequence
gccgtaaccg

SEQ ID NO: 16 - DNA, 10 bp, Artificial Sequence
  Synthetic Sequence
aaccattctc

SEQ ID NO: 17 - DNA, 10 bp, Artificial Sequence
  Synthetic Sequence
ggttgcctct

SEQ ID NO: 18 - DNA, 10 bp, Artificial Sequence
  Synthetic Sequence
ctaatgatgg

SEQ ID NO: 19 - DNA, 10 bp, Artificial Sequence
  Synthetic Sequence
tcggcctatc

SEQ ID NO: 20 - DNA, 10 bp, Artificial Sequence
  Synthetic Sequence
tttaacgtcc

SEQ ID NO: 21 - DNA, 10 bp, Artificial Sequence
  Synthetic Sequence
cgcttgagat

SEQ ID NO: 22 - DNA, 10 bp, Artificial Sequence
  Synthetic Sequence
aatatggagt

SEQ ID NO: 23 - DNA, 10 bp, Artificial Sequence
  Synthetic Sequence
gttgtcctgg

SEQ ID NO: 24 - DNA, 10 bp, Artificial Sequence
  Synthetic Sequence
ctacacgata

SEQ ID NO: 25 - DNA, 10 bp, Artificial Sequence
  Synthetic Sequence
tgaacctaac

SEQ ID NO: 26 - DNA, 10 bp, Artificial Sequence
  Synthetic Sequence
gggaattaga

SEQ ID NO: 27 - DNA, 10 bp, Artificial Sequence
  Synthetic Sequence
gagacgtgaa

SEQ ID NO: 28 - DNA, 10 bp, Artificial Sequence
  Synthetic Sequence
gctccctctc

SEQ ID NO: 29 - DNA, 10 bp, Artificial Sequence
  Synthetic Sequence
cttgagaaca

SEQ ID NO: 30 - DNA, 10 bp, Artificial Sequence
  Synthetic Sequence
aactcgtcca

SEQ ID NO: 31 - DNA, 10 bp, Artificial Sequence
  Synthetic Sequence
actagtaatc

SEQ ID NO: 32 - DNA, 10 bp, Artificial Sequence
  Synthetic Sequence
tcaactcaat

SEQ ID NO: 33 - DNA, 10 bp, Artificial Sequence
  Synthetic Sequence
ctccacctct

SEQ ID NO: 34 - DNA, 10 bp, Artificial Sequence
  Synthetic Sequence
cggccgattt

SEQ ID NO: 35 - DNA, 10 bp, Artificial Sequence
  Synthetic Sequence
gcaatatggt

SEQ ID NO: 36 - DNA, 10 bp, Artificial Sequence
  Synthetic Sequence
aatgcactgg

SEQ ID NO: 37 - DNA, 10 bp, Artificial Sequence
  Synthetic Sequence
agatacggcg

SEQ ID NO: 38 - DNA, 10 bp, Artificial Sequence
  Synthetic Sequence
gctaatgttc

SEQ ID NO: 39 - DNA, 10 bp, Artificial Sequence
  Synthetic Sequence
caaactatcg

SEQ ID NO: 40 - DNA, 10 bp, Artificial Sequence
  Synthetic Sequence
gttcagaggc

SEQ ID NO: 41 - DNA, 10 bp, Artificial Sequence
  Synthetic Sequence
agctaagcca

SEQ ID NO: 42 - DNA, 10 bp, Artificial Sequence
  Synthetic Sequence
cgattatgtg

SEQ ID NO: 43 - DNA, 10 bp, Artificial Sequence
  Synthetic Sequence
ccagctagca

SEQ ID NO: 44 - DNA, 10 bp, Artificial Sequence
  Synthetic Sequence
tcacattgcg

SEQ ID NO: 45 - DNA, 10 bp, Artificial Sequence
  Synthetic Sequence
agtagaatcc

SEQ ID NO: 46 - DNA, 10 bp, Artificial Sequence
  Synthetic Sequence
agtagcccag

SEQ ID NO: 47 - DNA, 10 bp, Artificial Sequence
  Synthetic Sequence
gctgaatgcg

SEQ ID NO: 48 - DNA, 10 bp, Artificial Sequence
  Synthetic Sequence
ctacctattc

SEQ ID NO: 49 - DNA, 10 bp, Artificial Sequence
  Synthetic Sequence
gcccttcgga

SEQ ID NO: 50 - DNA, 10 bp, Artificial Sequence
  Synthetic Sequence
ggaggagaat

SEQ ID NO: 51 - DNA, 10 bp, Artificial Sequence
  Synthetic Sequence
atccgcctgc

SEQ ID NO: 52 - DNA, 10 bp, Artificial Sequence
  Synthetic Sequence
gtgggacgat

SEQ ID NO: 53 - DNA, 10 bp, Artificial Sequence
  Synthetic Sequence
tacagaatgg

SEQ ID NO: 54 - DNA, 10 bp, Artificial Sequence
  Synthetic Sequence
tccctgtcag

SEQ ID NO: 55 - DNA, 10 bp, Artificial Sequence
  Synthetic Sequence
ctacgtagtt

SEQ ID NO: 56 - DNA, 10 bp, Artificial Sequence
  Synthetic Sequence
attactgaag

SEQ ID NO: 57 - DNA, 10 bp, Artificial Sequence
  Synthetic Sequence
atttcgagaa

SEQ ID NO: 58 - DNA, 10 bp, Artificial Sequence
  Synthetic Sequence
agggctgttt

SEQ ID NO: 59 - DNA, 10 bp, Artificial Sequence
  Synthetic Sequence
ttacagcggt

SEQ ID NO: 60 - DNA, 10 bp, Artificial Sequence
  Synthetic Sequence
gagtatgaga

SEQ ID NO: 61 - DNA, 10 bp, Artificial Sequence
  Synthetic Sequence
ggtactatcg

SEQ ID NO: 62 - DNA, 10 bp, Artificial Sequence
  Synthetic Sequence
tactggccga

SEQ ID NO: 63 - DNA, 10 bp, Artificial Sequence
  Synthetic Sequence
catagtgccg

SEQ ID NO: 64 - DNA, 10 bp, Artificial Sequence
  Synthetic Sequence
tgacgctatg

SEQ ID NO: 65 - DNA, 10 bp, Artificial Sequence
  Synthetic Sequence
ccgaacaagg

SEQ ID NO: 66 - DNA, 10 bp, Artificial Sequence
  Synthetic Sequence
gtggtaccac

SEQ ID NO: 67 - DNA, 10 bp, Artificial Sequence
  Synthetic Sequence
caacgtatcc

SEQ ID NO: 68 - DNA, 10 bp, Artificial Sequence
  Synthetic Sequence
taagattaca

SEQ ID NO: 69 - DNA, 10 bp, Artificial Sequence
  Synthetic Sequence
ttggaagaat

SEQ ID NO: 70 - DNA, 10 bp, Artificial Sequence
  Synthetic Sequence
caggtcgagt

SEQ ID NO: 71 - DNA, 10 bp, Artificial Sequence
  Synthetic Sequence
aagcacgtcg

SEQ ID NO: 72 - DNA, 10 bp, Artificial Sequence
  Synthetic Sequence
ccaaagcatc

SEQ ID NO: 73 - DNA, 10 bp, Artificial Sequence
  Synthetic Sequence
actctgaatc

SEQ ID NO: 74 - DNA, 10 bp, Artificial Sequence
  Synthetic Sequence
caggtacgag

SEQ ID NO: 75 - DNA, 10 bp, Artificial Sequence
  Synthetic Sequence
ggtaatcaag

SEQ ID NO: 76 - DNA, 10 bp, Artificial Sequence
  Synthetic Sequence
ctgtgcatcc

SEQ ID NO: 77 - DNA, 10 bp, Artificial Sequence
  Synthetic Sequence
ctcagctgct

SEQ ID NO: 78 - DNA, 10 bp, Artificial Sequence
  Synthetic Sequence
cactagcctt

SEQ ID NO: 79 - DNA, 10 bp, Artificial Sequence
  Synthetic Sequence
aggatcctgg

SEQ ID NO: 80 - DNA, 10 bp, Artificial Sequence
  Synthetic Sequence
aagtataagc

SEQ ID NO: 81 - DNA, 10 bp, Artificial Sequence
  Synthetic Sequence
acaaagtaat

SEQ ID NO: 82 - DNA, 10 bp, Artificial Sequence
  Synthetic Sequence
ttgacaatga

SEQ ID NO: 83 - DNA, 10 bp, Artificial Sequence
  Synthetic Sequence
agtcatacaa

SEQ ID NO: 84 - DNA, 10 bp, Artificial Sequence
  Synthetic Sequence
agggtgcgag

SEQ ID NO: 85 - DNA, 10 bp, Artificial Sequence
  Synthetic Sequence
aacgctcggt

SEQ ID NO: 86 - DNA, 10 bp, Artificial Sequence
  Synthetic Sequence
tctgagcatc

SEQ ID NO: 87 - DNA, 10 bp, Artificial Sequence
  Synthetic Sequence
ccactcgttc

SEQ ID NO: 88 - DNA, 10 bp, Artificial Sequence
  Synthetic Sequence
tccgaaataa

SEQ ID NO: 89 - DNA, 10 bp, Artificial Sequence
  Synthetic Sequence
gagaaccgcc

SEQ ID NO: 90 - DNA, 10 bp, Artificial Sequence
  Synthetic Sequence
gctgccttgc

SEQ ID NO: 91 - DNA, 10 bp, Artificial Sequence
  Synthetic Sequence
gaacgttaca

SEQ ID NO: 92 - DNA, 10 bp, Artificial Sequence
  Synthetic Sequence
gtctgcagtt

SEQ ID NO: 93 - DNA, 10 bp, Artificial Sequence
  Synthetic Sequence
attgtggaca

SEQ ID NO: 94 - DNA, 10 bp, Artificial Sequence
  Synthetic Sequence
tccgcttggg

SEQ ID NO: 95 - DNA, 10 bp, Artificial Sequence
  Synthetic Sequence
gtaaataatt

SEQ ID NO: 96 - DNA, 10 bp, Artificial Sequence
  Synthetic Sequence
gacgttccac

SEQ ID NO: 97 - DNA, 10 bp, Artificial Sequence
  Synthetic Sequence
cttcgattca

SEQ ID NO: 98 - DNA, 10 bp, Artificial Sequence
  Synthetic Sequence
gggttccatt

SEQ ID NO: 99 - DNA, 10 bp, Artificial Sequence
  Synthetic Sequence
tccagacgtg

SEQ ID NO: 100 - DNA, 10 bp, Artificial Sequence
  Synthetic Sequence
catcgcccaa

SEQ ID NO: 101 - DNA, 10 bp, Artificial Sequence
  Synthetic Sequence
ggaatggcgg

SEQ ID NO: 102 - DNA, 10 bp, Artificial Sequence
  Synthetic Sequence
ataaggcttc

SEQ ID NO: 103 - DNA, 10 bp, Artificial Sequence
  Synthetic Sequence
aatagagcga

SEQ ID NO: 104 - DNA, 10 bp, Artificial Sequence
  Synthetic Sequence
aaccagttca

SEQ ID NO: 105 - DNA, 10 bp, Artificial Sequence
  Synthetic Sequence
taacttggcc

SEQ ID NO: 106 - DNA, 10 bp, Artificial Sequence
  Synthetic Sequence
accgccattt

SEQ ID NO: 107 - DNA, 10 bp, Artificial Sequence
  Synthetic Sequence
catcagcagg

SEQ ID NO: 108 - DNA, 10 bp, Artificial Sequence
  Synthetic Sequence
actaaaggcg

SEQ ID NO: 109 - DNA, 10 bp, Artificial Sequence
  Synthetic Sequence
tattctcccg

SEQ ID NO: 110 - DNA, 10 bp, Artificial Sequence
  Synthetic Sequence
ctgtagagag

SEQ ID NO: 111 - DNA, 10 bp, Artificial Sequence
  Synthetic Sequence
tggagtgaat

SEQ ID NO: 112 - DNA, 10 bp, Artificial Sequence
  Synthetic Sequence
atgaaatggc

SEQ ID NO: 113 - DNA, 10 bp, Artificial Sequence
  Synthetic Sequence
gatgacaaga

SEQ ID NO: 114 - DNA, 10 bp, Artificial Sequence
  Synthetic Sequence
atccgatgag

SEQ ID NO: 115 - DNA, 10 bp, Artificial Sequence
  Synthetic Sequence
tctctcatgc

SEQ ID NO: 116 - DNA, 10 bp, Artificial Sequence
  Synthetic Sequence
tagctttcat

SEQ ID NO: 117 - DNA, 10 bp, Artificial Sequence
  Synthetic Sequence
cgtgaatgcc

SEQ ID NO: 118 - DNA, 10 bp, Artificial Sequence
  Synthetic Sequence
gagttcggtc

SEQ ID NO: 119 - DNA, 10 bp, Artificial Sequence
  Synthetic Sequence
tctgtctgtc

SEQ ID NO: 120 - DNA, 10 bp, Artificial Sequence
  Synthetic Sequence
aagaaacacg

SEQ ID NO: 121 - DNA, 10 bp, Artificial Sequence
  Synthetic Sequence
gaggccaaat

SEQ ID NO: 122 - DNA, 10 bp, Artificial Sequence
  Synthetic Sequence
gcaaagttag

SEQ ID NO: 123 - DNA, 10 bp, Artificial Sequence
  Synthetic Sequence
actagggtgt

SEQ ID NO: 124 - DNA, 10 bp, Artificial Sequence
  Synthetic Sequence
tcttcacttg

SEQ ID NO: 125 - DNA, 10 bp, Artificial Sequence
  Synthetic Sequence
aattacagat

SEQ ID NO: 126 - DNA, 10 bp, Artificial Sequence
  Synthetic Sequence
agcacgggtc

SEQ ID NO: 127 - DNA, 10 bp, Artificial Sequence
  Synthetic Sequence
aatggatact

SEQ ID NO: 128 - DNA, 10 bp, Artificial Sequence
  Synthetic Sequence
ctatgtatca

SEQ ID NO: 129 - DNA, 10 bp, Artificial Sequence
  Synthetic Sequence
atcagctgaa

SEQ ID NO: 130 - DNA, 10 bp, Artificial Sequence
  Synthetic Sequence
agacgactga

SEQ ID NO: 131 - DNA, 10 bp, Artificial Sequence
  Synthetic Sequence
cgtctgataa

SEQ ID NO: 132 - DNA, 10 bp, Artificial Sequence
  Synthetic Sequence
tccagaggat

SEQ ID NO: 133 - DNA, 10 bp, Artificial Sequence
  Synthetic Sequence
gtagcgttga

SEQ ID NO: 134 - DNA, 10 bp, Artificial Sequence
  Synthetic Sequence
gttcgcggaa

SEQ ID NO: 135 - DNA, 10 bp, Artificial Sequence
  Synthetic Sequence
catacggcgt

SEQ ID NO: 136 - DNA, 10 bp, Artificial Sequence
  Synthetic Sequence
tggtgcttta

SEQ ID NO: 137 - DNA, 10 bp, Artificial Sequence
  Synthetic Sequence
agagcattga

SEQ ID NO: 138 - DNA, 10 bp, Artificial Sequence
  Synthetic Sequence
acttactgta

SEQ ID NO: 139 - DNA, 10 bp, Artificial Sequence
  Synthetic Sequence
tactccgtca

SEQ ID NO: 140 - DNA, 10 bp, Artificial Sequence
  Synthetic Sequence
agggcgtacg

SEQ ID NO: 141 - DNA, 10 bp, Artificial Sequence
  Synthetic Sequence
ggttctacat

SEQ ID NO: 142 - DNA, 10 bp, Artificial Sequence
  Synthetic Sequence
cacgacattg

SEQ ID NO: 143 - DNA, 10 bp, Artificial Sequence
  Synthetic Sequence
gctgcatgtc

SEQ ID NO: 144 - DNA, 10 bp, Artificial Sequence
  Synthetic Sequence
tgttcaacaa

SEQ ID NO: 145 - DNA, 10 bp, Artificial Sequence
  Synthetic Sequence
atagtgactt

SEQ ID NO: 146 - DNA, 10 bp, Artificial Sequence
  Synthetic Sequence
tgcgaccaca

SEQ ID NO: 147 - DNA, 10 bp, Artificial Sequence
  Synthetic Sequence
gtggtagcgg

SEQ ID NO: 148 - DNA, 10 bp, Artificial Sequence
  Synthetic Sequence
tcgggctgac

SEQ ID NO: 149 - DNA, 10 bp, Artificial Sequence
  Synthetic Sequence
cagctcgtgg

SEQ ID NO: 150 - DNA, 10 bp, Artificial Sequence
  Synthetic Sequence
gtcagaggac

SEQ ID NO: 151 - DNA, 10 bp, Artificial Sequence
  Synthetic Sequence
ggtggcaata

SEQ ID NO: 152 - DNA, 10 bp, Artificial Sequence
  Synthetic Sequence
cccttagcac

SEQ ID NO: 153 - DNA, 10 bp, Artificial Sequence
  Synthetic Sequence
tctaccagtt

SEQ ID NO: 154 - DNA, 10 bp, Artificial Sequence
  Synthetic Sequence
gatgagcaaa

SEQ ID NO: 155 - DNA, 10 bp, Artificial Sequence
  Synthetic Sequence
acgctagccg

SEQ ID NO: 156 - DNA, 10 bp, Artificial Sequence
  Synthetic Sequence
atgtggaggt

SEQ ID NO: 157 - DNA, 10 bp, Artificial Sequence
  Synthetic Sequence
ctaccacaga

SEQ ID NO: 158 - DNA, 10 bp, Artificial Sequence
  Synthetic Sequence
gcctaaccag

SEQ ID NO: 159 - DNA, 10 bp, Artificial Sequence
  Synthetic Sequence
cctgatgacg

SEQ ID NO: 160 - DNA, 10 bp, Artificial Sequence
  Synthetic Sequence
tcaactgagg

SEQ ID NO: 161 - DNA, 10 bp, Artificial Sequence
  Synthetic Sequence
tgtgacaagc

SEQ ID NO: 162 - DNA, 10 bp, Artificial Sequence
  Synthetic Sequence
cacatagcat

SEQ ID NO: 163 - DNA, 10 bp, Artificial Sequence
  Synthetic Sequence
cgaacatcac

SEQ ID NO: 164 - DNA, 10 bp, Artificial Sequence
  Synthetic Sequence
actaagacgt

SEQ ID NO: 165 - DNA, 10 bp, Artificial Sequence
  Synthetic Sequence
ggaaaggtct

SEQ ID NO: 166 - DNA, 10 bp, Artificial Sequence
  Synthetic Sequence
acatctagcg

SEQ ID NO: 167 - DNA, 10 bp, Artificial Sequence
  Synthetic Sequence
catggccaca

SEQ ID NO: 168 - DNA, 10 bp, Artificial Sequence
  Synthetic Sequence
cgggcagata

SEQ ID NO: 169 - DNA, 10 bp, Artificial Sequence
  Synthetic Sequence
attggcataa

SEQ ID NO: 170 - DNA, 10 bp, Artificial Sequence
  Synthetic Sequence
cccagtataa

SEQ ID NO: 171 - DNA, 10 bp, Artificial Sequence
  Synthetic Sequence
acggctgcct

SEQ ID NO: 172 - DNA, 10 bp, Artificial Sequence
  Synthetic Sequence
cacgcttcat

SEQ ID NO: 173 - DNA, 10 bp, Artificial Sequence
  Synthetic Sequence
aagtcactaa

SEQ ID NO: 174 - DNA, 10 bp, Artificial Sequence
  Synthetic Sequence
caggctcgct

SEQ ID NO: 175 - DNA, 10 bp, Artificial Sequence
  Synthetic Sequence
ttcaatgctc

SEQ ID NO: 176 - DNA, 10 bp, Artificial Sequence
  Synthetic Sequence
gaacgattcc

SEQ ID NO: 177 - DNA, 10 bp, Artificial Sequence
  Synthetic Sequence
cccttaatgc

SEQ ID NO: 178 - DNA, 10 bp, Artificial Sequence
  Synthetic Sequence
cagcaagcga

SEQ ID NO: 179 - DNA, 10 bp, Artificial Sequence
  Synthetic Sequence
taagataatt

SEQ ID NO: 180 - DNA, 10 bp, Artificial Sequence
  Synthetic Sequence
ctgaagggat

SEQ ID NO: 181 - DNA, 10 bp, Artificial Sequence
  Synthetic Sequence
ttccttccac

SEQ ID NO: 182 - DNA, 10 bp, Artificial Sequence
  Synthetic Sequence
atccattggt

SEQ ID NO: 183 - DNA, 10 bp, Artificial Sequence
  Synthetic Sequence
tgatcggccc

SEQ ID NO: 184 - DNA, 10 bp, Artificial Sequence
  Synthetic Sequence
cgatcggttc

SEQ ID NO: 185 - DNA, 10 bp, Artificial Sequence
  Synthetic Sequence
cagtactacg

SEQ ID NO: 186 - DNA, 10 bp, Artificial Sequence
  Synthetic Sequence
caggtacatt

SEQ ID NO: 187 - DNA, 10 bp, Artificial Sequence
  Synthetic Sequence
agtgctccgt

SEQ ID NO: 188 - DNA, 10 bp, Artificial Sequence
  Synthetic Sequence
ctggacactt

SEQ ID NO: 189 - DNA, 10 bp, Artificial Sequence
  Synthetic Sequence
agaacctagt

SEQ ID NO: 190 - DNA, 10 bp, Artificial Sequence
  Synthetic Sequence
ggctgtgatg

SEQ ID NO: 191 - DNA, 10 bp, Artificial Sequence
  Synthetic Sequence
aacatctagc

SEQ ID NO: 192 - DNA, 10 bp, Artificial Sequence
  Synthetic Sequence
ttgccacgtc

SEQ ID NO: 193 - DNA, 10 bp, Artificial Sequence
  Synthetic Sequence
agaagacgtc

SEQ ID NO: 194 - DNA, 10 bp, Artificial Sequence
  Synthetic Sequence
ggattccgct

SEQ ID NO: 195 - DNA, 10 bp, Artificial Sequence
  Synthetic Sequence
ccgtgtagat

SEQ ID NO: 196 - DNA, 10 bp, Artificial Sequence
  Synthetic Sequence
tcacggtgag

SEQ ID NO: 197 - DNA, 10 bp, Artificial Sequence
  Synthetic Sequence
cggagtccgt

SEQ ID NO: 198 - DNA, 10 bp, Artificial Sequence
  Synthetic Sequence
tataacgaca

SEQ ID NO: 199 - DNA, 10 bp, Artificial Sequence
  Synthetic Sequence
accaaacaga

SEQ ID NO: 200 - DNA, 10 bp, Artificial Sequence
  Synthetic Sequence
catctatggg

SEQ ID NO: 201 - DNA, 10 bp, Artificial Sequence
  Synthetic Sequence
tcgtacctcc

SEQ ID NO: 202 - DNA, 10 bp, Artificial Sequence
  Synthetic Sequence
caaagcgcgg

SEQ ID NO: 203 - DNA, 10 bp, Artificial Sequence
  Synthetic Sequence
ggatgcaatg

SEQ ID NO: 204 - DNA, 10 bp, Artificial Sequence
  Synthetic Sequence
ctgagtccag

SEQ ID NO: 205 - DNA, 10 bp, Artificial Sequence
  Synthetic Sequence
attaattcgg

SEQ ID NO: 206 - DNA, 10 bp, Artificial Sequence
  Synthetic Sequence
tttcctggaa

SEQ ID NO: 207 - DNA, 10 bp, Artificial Sequence
  Synthetic Sequence
actcagatag

SEQ ID NO: 208 - DNA, 10 bp, Artificial Sequence
  Synthetic Sequence
gtttgtcaac

SEQ ID NO: 209 - DNA, 10 bp, Artificial Sequence
  Synthetic Sequence
gcgctagagg

SEQ ID NO: 210 - DNA, 10 bp, Artificial Sequence
  Synthetic Sequence
cttatcgagc

SEQ ID NO: 211 - DNA, 10 bp, Artificial Sequence
  Synthetic Sequence
ttcgtgatat

SEQ ID NO: 212 - DNA, 10 bp, Artificial Sequence
  Synthetic Sequence
ataacgtgct

SEQ ID NO: 213 - DNA, 10 bp, Artificial Sequence
  Synthetic Sequence
caagtcctag

SEQ ID NO: 214 - DNA, 10 bp, Artificial Sequence
  Synthetic Sequence
cctggtctct

SEQ ID NO: 215 - DNA, 10 bp, Artificial Sequence
  Synthetic Sequence
cgctgccctt

SEQ ID NO: 216 - DNA, 10 bp, Artificial Sequence
  Synthetic Sequence
agctctagag

SEQ ID NO: 217 - DNA, 10 bp, Artificial Sequence
  Synthetic Sequence
gctacgcctg

SEQ ID NO: 218 - DNA, 10 bp, Artificial Sequence
  Synthetic Sequence
tcctggaaac

SEQ ID NO: 219 - DNA, 10 bp, Artificial Sequence
  Synthetic Sequence
ccgtcgatat

SEQ ID NO: 220 - DNA, 10 bp, Artificial Sequence
  Synthetic Sequence
tcacaaatcc

SEQ ID NO: 221 - DNA, 10 bp, Artificial Sequence
  Synthetic Sequence
cacgaagaga

SEQ ID NO: 222 - DNA, 10 bp, Artificial Sequence
  Synthetic Sequence
gacgacctcc

SEQ ID NO: 223 - DNA, 10 bp, Artificial Sequence
  Synthetic Sequence
gttacttagt

SEQ ID NO: 224 - DNA, 10 bp, Artificial Sequence
  Synthetic Sequence
acacggagcc

SEQ ID NO: 225 - DNA, 10 bp, Artificial Sequence
  Synthetic Sequence
ctgctatcgt

SEQ ID NO: 226 - DNA, 10 bp, Artificial Sequence
  Synthetic Sequence
aggtgcggta

SEQ ID NO: 227 - DNA, 10 bp, Artificial Sequence
  Synthetic Sequence
atgcgcctct

SEQ ID NO: 228 - DNA, 10 bp, Artificial Sequence
  Synthetic Sequence
tatgaatcca

SEQ ID NO: 229 - DNA, 10 bp, Artificial Sequence
  Synthetic Sequence
cacggaaggt

SEQ ID NO: 230 - DNA, 10 bp, Artificial Sequence
  Synthetic Sequence
tactacggga

SEQ ID NO: 231 - DNA, 10 bp, Artificial Sequence
  Synthetic Sequence
ctccgcagag

SEQ ID NO: 232 - DNA, 10 bp, Artificial Sequence
  Synthetic Sequence
ggtcagatcc

SEQ ID NO: 233 - DNA, 10 bp, Artificial Sequence
  Synthetic Sequence
gagcttcgaa

SEQ ID NO: 234 - DNA, 10 bp, Artificial Sequence
  Synthetic Sequence
cgcctcagga

SEQ ID NO: 235 - DNA, 10 bp, Artificial Sequence
  Synthetic Sequence
tccactttcc

SEQ ID NO: 236 - DNA, 10 bp, Artificial Sequence
  Synthetic Sequence
tctgttaaac

SEQ ID NO: 237 - DNA, 10 bp, Artificial Sequence
  Synthetic Sequence
tagcgtgcaa

SEQ ID NO: 238 - DNA, 10 bp, Artificial Sequence
  Synthetic Sequence
gctgggtctt

SEQ ID NO: 239 - DNA, 10 bp, Artificial Sequence
  Synthetic Sequence
cacctccgta

SEQ ID NO: 240 - DNA, 10 bp, Artificial Sequence
  Synthetic Sequence
ggcaagagct

SEQ ID NO: 241 - DNA, 10 bp, Artificial Sequence
  Synthetic Sequence
gtgtgatatg

SEQ ID NO: 242 - DNA, 10 bp, Artificial Sequence
  Synthetic Sequence
tggcaaaggc

SEQ ID NO: 243 - DNA, 10 bp, Artificial Sequence
  Synthetic Sequence
agctgatcta

SEQ ID NO: 244 - DNA, 10 bp, Artificial Sequence
  Synthetic Sequence
tcagggccct

SEQ ID NO: 245 - DNA, 10 bp, Artificial Sequence
  Synthetic Sequence
atgcggcaca

SEQ ID NO: 246 - DNA, 10 bp, Artificial Sequence
  Synthetic Sequence
accctctatt

SEQ ID NO: 247 - DNA, 10 bp, Artificial Sequence
  Synthetic Sequence
ggccgaattt

SEQ ID NO: 248 - DNA, 10 bp, Artificial Sequence
  Synthetic Sequence
cctcgtagcc

SEQ ID NO: 249 - DNA, 10 bp, Artificial Sequence
  Synthetic Sequence
caagcaattt

SEQ ID NO: 250 - DNA, 10 bp, Artificial Sequence
  Synthetic Sequence
cattggttag

SEQ ID NO: 251 - DNA, 10 bp, Artificial Sequence
  Synthetic Sequence
gcgaatgcac

SEQ ID NO: 252 - DNA, 10 bp, Artificial Sequence
  Synthetic Sequence
tgcatgtgaa

SEQ ID NO: 253 - DNA, 10 bp, Artificial Sequence
  Synthetic Sequence
tacatatcga

SEQ ID NO: 254 - DNA, 10 bp, Artificial Sequence
  Synthetic Sequence
tggaggaaac

SEQ ID NO: 255 - DNA, 10 bp, Artificial Sequence
  Synthetic Sequence
cgcgcaaagg

SEQ ID NO: 256 - DNA, 10 bp, Artificial Sequence
  Synthetic Sequence
ttgccagcca

SEQ ID NO: 257 - DNA, 10 bp, Artificial Sequence
  Synthetic Sequence
aaccacgccc

SEQ ID NO: 258 - DNA, 10 bp, Artificial Sequence
  Synthetic Sequence
tgcaaacttg

SEQ ID NO: 259 - DNA, 10 bp, Artificial Sequence
  Synthetic Sequence
tcttaatgag

SEQ ID NO: 260 - DNA, 10 bp, Artificial Sequence
  Synthetic Sequence
ccgcattcca

SEQ ID NO: 261 - DNA, 10 bp, Artificial Sequence
  Synthetic Sequence
ctctggctga

SEQ ID NO: 262 - DNA, 10 bp, Artificial Sequence
  Synthetic Sequence
aaactccgcg

SEQ ID NO: 263 - DNA, 10 bp, Artificial Sequence
  Synthetic Sequence
catgcatgtt

SEQ ID NO: 264 - DNA, 10 bp, Artificial Sequence
  Synthetic Sequence
ggccctttgc

SEQ ID NO: 265 - DNA, 10 bp, Artificial Sequence
  Synthetic Sequence
gcaccgagtg

SEQ ID NO: 266 - DNA, 10 bp, Artificial Sequence
  Synthetic Sequence
accgaccaag

SEQ ID NO: 267 - DNA, 10 bp, Artificial Sequence
  Synthetic Sequence
cagaattgga

SEQ ID NO: 268 - DNA, 10 bp, Artificial Sequence
  Synthetic Sequence
ggcaccgatt

SEQ ID NO: 269 - DNA, 10 bp, Artificial Sequence
  Synthetic Sequence
gggaggttga

SEQ ID NO: 270 - DNA, 10 bp, Artificial Sequence
  Synthetic Sequence
gaaacggaaa

SEQ ID NO: 271 - DNA, 10 bp, Artificial Sequence
  Synthetic Sequence
aattatatac

SEQ ID NO: 272 - DNA, 10 bp, Artificial Sequence
  Synthetic Sequence
gtacatacga

SEQ ID NO: 273 - DNA, 10 bp, Artificial Sequence
  Synthetic Sequence
acgtccttgt

SEQ ID NO: 274 - DNA, 10 bp, Artificial Sequence
  Synthetic Sequence
atgtggctac

SEQ ID NO: 275 - DNA, 10 bp, Artificial Sequence
  Synthetic Sequence
caagagacat

SEQ ID NO: 276 - DNA, 10 bp, Artificial Sequence
  Synthetic Sequence
ggcccgactt

SEQ ID NO: 277 - DNA, 10 bp, Artificial Sequence
  Synthetic Sequence
acattgtgta

SEQ ID NO: 278 - DNA, 10 bp, Artificial Sequence
  Synthetic Sequence
tattcattcg

SEQ ID NO: 279 - DNA, 10 bp, Artificial Sequence
  Synthetic Sequence
gagtcgattg

SEQ ID NO: 280 - DNA, 10 bp, Artificial Sequence
  Synthetic Sequence
ttcggtctaa

SEQ ID NO: 281 - DNA, 10 bp, Artificial Sequence
  Synthetic Sequence
aacagttcgc

SEQ ID NO: 282 - DNA, 10 bp, Artificial Sequence
  Synthetic Sequence
acaaccgaag

SEQ ID NO: 283 - DNA, 10 bp, Artificial Sequence
  Synthetic Sequence
acatgcgata

SEQ ID NO: 284 - DNA, 10 bp, Artificial Sequence
  Synthetic Sequence
gcagtacagg

SEQ ID NO: 285 - DNA, 10 bp, Artificial Sequence
  Synthetic Sequence
aagagcacgt

SEQ ID NO: 286 - DNA, 10 bp, Artificial Sequence
  Synthetic Sequence
actcagagca

SEQ ID NO: 287 - DNA, 10 bp, Artificial Sequence
  Synthetic Sequence
acaatgacgg

SEQ ID NO: 288 - DNA, 10 bp, Artificial Sequence
  Synthetic Sequence
cacctgttag

SEQ ID NO: 289 - DNA, 10 bp, Artificial Sequence
  Synthetic Sequence
gctgtttcca

SEQ ID NO: 290 - DNA, 10 bp, Artificial Sequence
  Synthetic Sequence
tggttgcgac

SEQ ID NO: 291 - DNA, 10 bp, Artificial Sequence
  Synthetic Sequence
gggaaactcc

SEQ ID NO: 292 - DNA, 10 bp, Artificial Sequence
  Synthetic Sequence
taaatcgcgc

SEQ ID NO: 293 - DNA, 10 bp, Artificial Sequence
  Synthetic Sequence
gtctgacggc

SEQ ID NO: 294 - DNA, 10 bp, Artificial Sequence
  Synthetic Sequence
gcccagccaa

SEQ ID NO: 295 - DNA, 10 bp, Artificial Sequence
  Synthetic Sequence
catagagata

SEQ ID NO: 296 - DNA, 10 bp, Artificial Sequence
  Synthetic Sequence
tagtcggctc

SEQ ID NO: 297 - DNA, 10 bp, Artificial Sequence
  Synthetic Sequence
tagaacacaa

SEQ ID NO: 298 - DNA, 10 bp, Artificial Sequence
  Synthetic Sequence
ggtcgtattg

SEQ ID NO: 299 - DNA, 10 bp, Artificial Sequence
  Synthetic Sequence
tcgttatttg

SEQ ID NO: 300 - DNA, 10 bp, Artificial Sequence
  Synthetic Sequence
aaacattgtg

SEQ ID NO: 301 - DNA, 10 bp, Artificial Sequence
  Synthetic Sequence
agcgcatgat

SEQ ID NO: 302 - DNA, 10 bp, Artificial Sequence
  Synthetic Sequence
tcgtatactt

SEQ ID NO: 303 - DNA, 10 bp, Artificial Sequence
  Synthetic Sequence
tgccattgcc

SEQ ID NO: 304 - DNA, 10 bp, Artificial Sequence
  Synthetic Sequence
ggaacgttat

SEQ ID NO: 305 - DNA, 10 bp, Artificial Sequence
  Synthetic Sequence
tcagagacac

SEQ ID NO: 306 - DNA, 10 bp, Artificial Sequence
  Synthetic Sequence
ggtccttcca

SEQ ID NO: 307 - DNA, 10 bp, Artificial Sequence
  Synthetic Sequence
cgcgggattt

SEQ ID NO: 308 - DNA, 10 bp, Artificial Sequence
  Synthetic Sequence
acctggtggt

SEQ ID NO: 309 - DNA, 10 bp, Artificial Sequence
  Synthetic Sequence
atttgctaac

SEQ ID NO: 310 - DNA, 10 bp, Artificial Sequence
  Synthetic Sequence
gctcctcgaa

SEQ ID NO: 311 - DNA, 10 bp, Artificial Sequence
  Synthetic Sequence
tacctgctga

SEQ ID NO: 312 - DNA, 10 bp, Artificial Sequence
  Synthetic Sequence
ggccttagat

SEQ ID NO: 313 - DNA, 10 bp, Artificial Sequence
  Synthetic Sequence
gaatgcctca

SEQ ID NO: 314 - DNA, 10 bp, Artificial Sequence
  Synthetic Sequence
tgacctcctc

SEQ ID NO: 315 - DNA, 10 bp, Artificial Sequence
  Synthetic Sequence
tgcggtcgta

SEQ ID NO: 316 - DNA, 10 bp, Artificial Sequence
  Synthetic Sequence
tattacgtgc

SEQ ID NO: 317 - DNA, 10 bp, Artificial Sequence
  Synthetic Sequence
tattaaacct

SEQ ID NO: 318 - DNA, 10 bp, Artificial Sequence
  Synthetic Sequence
ccatgttcac

SEQ ID NO: 319 - DNA, 10 bp, Artificial Sequence
  Synthetic Sequence
tgaagtggta

SEQ ID NO: 320 - DNA, 10 bp, Artificial Sequence
  Synthetic Sequence
tccgagccta

SEQ ID NO: 321 - DNA, 10 bp, Artificial Sequence
  Synthetic Sequence
tcttagcaca

SEQ ID NO: 322 - DNA, 10 bp, Artificial Sequence
  Synthetic Sequence
gttcacaatg

SEQ ID NO: 323 - DNA, 10 bp, Artificial Sequence
  Synthetic Sequence
acacagtgct

SEQ ID NO: 324 - DNA, 10 bp, Artificial Sequence
  Synthetic Sequence
acaccacggg

SEQ ID NO: 325 - DNA, 10 bp, Artificial Sequence
  Synthetic Sequence
agtttaatat

SEQ ID NO: 326 - DNA, 10 bp, Artificial Sequence
  Synthetic Sequence
tgatcattca

SEQ ID NO: 327 - DNA, 10 bp, Artificial Sequence
  Synthetic Sequence
attgggtcca

SEQ ID NO: 328 - DNA, 10 bp, Artificial Sequence
  Synthetic Sequence
tcatgctacc

SEQ ID NO: 329 - DNA, 10 bp, Artificial Sequence
  Synthetic Sequence
atgtccattg

SEQ ID NO: 330 - DNA, 10 bp, Artificial Sequence
  Synthetic Sequence
aacaagtcgg

SEQ ID NO: 331 - DNA, 10 bp, Artificial Sequence
  Synthetic Sequence
tcaatcctac

SEQ ID NO: 332 - DNA, 10 bp, Artificial Sequence
  Synthetic Sequence
cattaagggt

SEQ ID NO: 333 - DNA, 10 bp, Artificial Sequence
  Synthetic Sequence
gtgaacggtc

SEQ ID NO: 334 - DNA, 10 bp, Artificial Sequence
  Synthetic Sequence
cggtctgaaa

SEQ ID NO: 335 - DNA, 10 bp, Artificial Sequence
  Synthetic Sequence
ctggaaattc

SEQ ID NO: 336 - DNA, 10 bp, Artificial Sequence
  Synthetic Sequence
cacgaacccg

SEQ ID NO: 337 - DNA, 10 bp, Artificial Sequence
  Synthetic Sequence
ggtggttgac

SEQ ID NO: 338 - DNA, 10 bp, Artificial Sequence
  Synthetic Sequence
ctcgttaagc

SEQ ID NO: 339 - DNA, 10 bp, Artificial Sequence
  Synthetic Sequence
ccagctgaga

SEQ ID NO: 340 - DNA, 10 bp, Artificial Sequence
  Synthetic Sequence
gtatctgtgt

SEQ ID NO: 341 - DNA, 10 bp, Artificial Sequence
  Synthetic Sequence
gagtttagac

SEQ ID NO: 342 - DNA, 10 bp, Artificial Sequence
  Synthetic Sequence
gtcgcttcca

SEQ ID NO: 343 - DNA, 10 bp, Artificial Sequence
  Synthetic Sequence
tgactggttt

SEQ ID NO: 344 - DNA, 10 bp, Artificial Sequence
  Synthetic Sequence
agatctaact

SEQ ID NO: 345 - DNA, 10 bp, Artificial Sequence
  Synthetic Sequence
catgtcacta

SEQ ID NO: 346 - DNA, 10 bp, Artificial Sequence
  Synthetic Sequence
cgcgattgcg

SEQ ID NO: 347 - DNA, 10 bp, Artificial Sequence
  Synthetic Sequence
ccatcaagct

SEQ ID NO: 348 - DNA, 10 bp, Artificial Sequence
  Synthetic Sequence
ggtacaagtc

SEQ ID NO: 349 - DNA, 10 bp, Artificial Sequence
  Synthetic Sequence
acccgaattg

SEQ ID NO: 350 - DNA, 10 bp, Artificial Sequence
  Synthetic Sequence
gcatacgagg

SEQ ID NO: 351 - DNA, 10 bp, Artificial Sequence
  Synthetic Sequence
tagtcacact

SEQ ID NO: 352 - DNA, 10 bp, Artificial Sequence
  Synthetic Sequence
gtcgtgcgat

SEQ ID NO: 353 - DNA, 10 bp, Artificial Sequence
  Synthetic Sequence
agcgttgagg

SEQ ID NO: 354 - DNA, 10 bp, Artificial Sequence
  Synthetic Sequence
gtacggacta

SEQ ID NO: 355 - DNA, 10 bp, Artificial Sequence
  Synthetic Sequence
acaagattat

SEQ ID NO: 356 - DNA, 10 bp, Artificial Sequence
  Synthetic Sequence
taaattaagc

SEQ ID NO: 357 - DNA, 10 bp, Artificial Sequence
  Synthetic Sequence
atcgttagat

SEQ ID NO: 358 - DNA, 10 bp, Artificial Sequence
  Synthetic Sequence
tcgcgaccac

SEQ ID NO: 359 - DNA, 10 bp, Artificial Sequence
  Synthetic Sequence
gaaggtgtgt

SEQ ID NO: 360 - DNA, 10 bp, Artificial Sequence
  Synthetic Sequence
catttcaaat

SEQ ID NO: 361 - DNA, 10 bp, Artificial Sequence
  Synthetic Sequence
ctacgtcctc

SEQ ID NO: 362 - DNA, 10 bp, Artificial Sequence
  Synthetic Sequence
caagggcgga

SEQ ID NO: 363 - DNA, 10 bp, Artificial Sequence
  Synthetic Sequence
ctaggaacgc

SEQ ID NO: 364 - DNA, 10 bp, Artificial Sequence
  Synthetic Sequence
tttgtgggcc

SEQ ID NO: 365 - DNA, 10 bp, Artificial Sequence
  Synthetic Sequence
ttagccgcga

SEQ ID NO: 366 - DNA, 10 bp, Artificial Sequence
  Synthetic Sequence
ttatgtgttc

SEQ ID NO: 367 - DNA, 10 bp, Artificial Sequence
  Synthetic Sequence
ccatcgctga

SEQ ID NO: 368 - DNA, 10 bp, Artificial Sequence
  Synthetic Sequence
ttctgggata

SEQ ID NO: 369 - DNA, 10 bp, Artificial Sequence
  Synthetic Sequence
gcgcaacaat

SEQ ID NO: 370 - DNA, 10 bp, Artificial Sequence
  Synthetic Sequence
tgattgatag

SEQ ID NO: 371 - DNA, 10 bp, Artificial Sequence
  Synthetic Sequence
cgccacatca

SEQ ID NO: 372 - DNA, 10 bp, Artificial Sequence
  Synthetic Sequence
gggctctcat

SEQ ID NO: 373 - DNA, 10 bp, Artificial Sequence
  Synthetic Sequence
tacgaaggtt

SEQ ID NO: 374 - DNA, 10 bp, Artificial Sequence
  Synthetic Sequence
ctgtcaggca

SEQ ID NO: 375 - DNA, 10 bp, Artificial Sequence
  Synthetic Sequence
ggcaatgcca

SEQ ID NO: 376 - DNA, 10 bp, Artificial Sequence
  Synthetic Sequence
ggtccgtaac

SEQ ID NO: 377 - DNA, 10 bp, Artificial Sequence
  Synthetic Sequence
cgcccaataa

SEQ ID NO: 378 - DNA, 10 bp, Artificial Sequence
  Synthetic Sequence
cccttcccag

SEQ ID NO: 379 - DNA, 10 bp, Artificial Sequence
  Synthetic Sequence
gacttcttgt

SEQ ID NO: 380 - DNA, 10 bp, Artificial Sequence
  Synthetic Sequence
aaacgtttct

SEQ ID NO: 381 - DNA, 10 bp, Artificial Sequence
  Synthetic Sequence
cagcgctcgt

SEQ ID NO: 382 - DNA, 10 bp, Artificial Sequence
  Synthetic Sequence
cgtcacctaa

SEQ ID NO: 383 - DNA, 10 bp, Artificial Sequence
  Synthetic Sequence
tgagtcatca

SEQ ID NO: 384 - DNA, 10 bp, Artificial Sequence
  Synthetic Sequence
gcttctcaag

SEQ ID NO: 385 - DNA, 10 bp, Artificial Sequence
  Synthetic Sequence
tgcgttcagc

SEQ ID NO: 386 - DNA, 10 bp, Artificial Sequence
  Synthetic Sequence
cacaagactg

SEQ ID NO: 387 - DNA, 10 bp, Artificial Sequence
  Synthetic Sequence
ctagcctttc

SEQ ID NO: 388 - DNA, 10 bp, Artificial Sequence
  Synthetic Sequence
cggatgtccg

SEQ ID NO: 389 - DNA, 10 bp, Artificial Sequence
  Synthetic Sequence
catcttacac

SEQ ID NO: 390 - DNA, 10 bp, Artificial Sequence
  Synthetic Sequence
cctcgtacaa

SEQ ID NO: 391 - DNA, 10 bp, Artificial Sequence
  Synthetic Sequence
tttatcagag

SEQ ID NO: 392 - DNA, 10 bp, Artificial Sequence
  Synthetic Sequence
ggagcataac

SEQ ID NO: 393 - DNA, 10 bp, Artificial Sequence
  Synthetic Sequence
cagtatataa

SEQ ID NO: 394 - DNA, 10 bp, Artificial Sequence
  Synthetic Sequence
gcgtgccaac

SEQ ID NO: 395 - DNA, 10 bp, Artificial Sequence
  Synthetic Sequence
tctggcaatt

SEQ ID NO: 396 - DNA, 10 bp, Artificial Sequence
  Synthetic Sequence
gctctaagct

SEQ ID NO: 397 - DNA, 10 bp, Artificial Sequence
  Synthetic Sequence
gtgcggtaat

SEQ ID NO: 398 - DNA, 10 bp, Artificial Sequence
  Synthetic Sequence
ctggaattct

SEQ ID NO: 399 - DNA, 10 bp, Artificial Sequence
  Synthetic Sequence
acggttctgc

SEQ ID NO: 400 - DNA, 10 bp, Artificial Sequence
  Synthetic Sequence
gatatctcac

SEQ ID NO: 401 - DNA, 10 bp, Artificial Sequence
  Synthetic Sequence
tatgcttctg

SEQ ID NO: 402 - DNA, 10 bp, Artificial Sequence
  Synthetic Sequence
tctggcgttc

SEQ ID NO: 403 - DNA, 10 bp, Artificial Sequence
  Synthetic Sequence
actcaactca

SEQ ID NO: 404 - DNA, 10 bp, Artificial Sequence
  Synthetic Sequence
accgccggaa

SEQ ID NO: 405 - DNA, 10 bp, Artificial Sequence
  Synthetic Sequence
tactctcggc

SEQ ID NO: 406 - DNA, 10 bp, Artificial Sequence
  Synthetic Sequence
ctctcaatcc

SEQ ID NO: 407 - DNA, 10 bp, Artificial Sequence
  Synthetic Sequence
taccgagtca

SEQ ID NO: 408 - DNA, 10 bp, Artificial Sequence
  Synthetic Sequence
tgaatttcgg

SEQ ID NO: 409 - DNA, 10 bp, Artificial Sequence
  Synthetic Sequence
cgagcttacg

SEQ ID NO: 410 - DNA, 10 bp, Artificial Sequence
  Synthetic Sequence
gctagattct

SEQ ID NO: 411 - DNA, 10 bp, Artificial Sequence
  Synthetic Sequence
aagccgtttg

SEQ ID NO: 412 - DNA, 10 bp, Artificial Sequence
  Synthetic Sequence
agtccatcct

SEQ ID NO: 413 - DNA, 10 bp, Artificial Sequence
  Synthetic Sequence
atcctatagg

SEQ ID NO: 414 - DNA, 10 bp, Artificial Sequence
  Synthetic Sequence
cgatttcgcg

SEQ ID NO: 415 - DNA, 10 bp, Artificial Sequence
  Synthetic Sequence
gatgtcggca

SEQ ID NO: 416 - DNA, 10 bp, Artificial Sequence
  Synthetic Sequence
actgatggtc

SEQ ID NO: 417 - DNA, 10 bp, Artificial Sequence
  Synthetic Sequence
ctagccagct

SEQ ID NO: 418 - DNA, 10 bp, Artificial Sequence
  Synthetic Sequence
catccgtact

SEQ ID NO: 419 - DNA, 10 bp, Artificial Sequence
  Synthetic Sequence
aggcgtgatt

SEQ ID NO: 420 - DNA, 10 bp, Artificial Sequence
  Synthetic Sequence
aggtacacct

SEQ ID NO: 421 - DNA, 10 bp, Artificial Sequence
  Synthetic Sequence
ttaatcaggc

SEQ ID NO: 422 - DNA, 10 bp, Artificial Sequence
  Synthetic Sequence
cgtgggacca

SEQ ID NO: 423 - DNA, 10 bp, Artificial Sequence
  Synthetic Sequence
tcctctggag

SEQ ID NO: 424 - DNA, 10 bp, Artificial Sequence
  Synthetic Sequence
gaacaagcgt

SEQ ID NO: 425 - DNA, 10 bp, Artificial Sequence
  Synthetic Sequence
ctcgactcgc

SEQ ID NO: 426 - DNA, 10 bp, Artificial Sequence
  Synthetic Sequence
gatatgattg

SEQ ID NO: 427 - DNA, 10 bp, Artificial Sequence
  Synthetic Sequence
ctcaggaatt

SEQ ID NO: 428 - DNA, 10 bp, Artificial Sequence
  Synthetic Sequence
gtcttggatg

SEQ ID NO: 429 - DNA, 10 bp, Artificial Sequence
  Synthetic Sequence
ttcagtaaag

SEQ ID NO: 430 - DNA, 10 bp, Artificial Sequence
  Synthetic Sequence
ccggagaata

SEQ ID NO: 431 - DNA, 10 bp, Artificial Sequence
  Synthetic Sequence
cggcagttac

SEQ ID NO: 432 - DNA, 10 bp, Artificial Sequence
  Synthetic Sequence
agacgtccta

SEQ ID NO: 433 - DNA, 10 bp, Artificial Sequence
  Synthetic Sequence
tatacctagt

SEQ ID NO: 434 - DNA, 10 bp, Artificial Sequence
  Synthetic Sequence
gtaggctcgc

SEQ ID NO: 435 - DNA, 10 bp, Artificial Sequence
  Synthetic Sequence
gcactcagat

SEQ ID NO: 436 - DNA, 10 bp, Artificial Sequence
  Synthetic Sequence
actataactg

SEQ ID NO: 437 - DNA, 10 bp, Artificial Sequence
  Synthetic Sequence
aattctaggc

SEQ ID NO: 438 - DNA, 10 bp, Artificial Sequence
  Synthetic Sequence
tgctatcttc

SEQ ID NO: 439 - DNA, 10 bp, Artificial Sequence
  Synthetic Sequence
tcccatgatt

SEQ ID NO: 440 - DNA, 10 bp, Artificial Sequence
  Synthetic Sequence
tggaagctgg

SEQ ID NO: 441 - DNA, 10 bp, Artificial Sequence
  Synthetic Sequence
gtcggtgcga

SEQ ID NO: 442 - DNA, 10 bp, Artificial Sequence
  Synthetic Sequence
cttcattggc

SEQ ID NO: 443 - DNA, 10 bp, Artificial Sequence
  Synthetic Sequence
atttcagcct

SEQ ID NO: 444 - DNA, 10 bp, Artificial Sequence
  Synthetic Sequence
tgtgatgctt

SEQ ID NO: 445 - DNA, 10 bp, Artificial Sequence
  Synthetic Sequence
ttgggtgtag

SEQ ID NO: 446 - DNA, 10 bp, Artificial Sequence
  Synthetic Sequence
ttataaacga

SEQ ID NO: 447 - DNA, 10 bp, Artificial Sequence
  Synthetic Sequence
agtttcggag

SEQ ID NO: 448 - DNA, 10 bp, Artificial Sequence
  Synthetic Sequence
tacaatactt

SEQ ID NO: 449 - DNA, 10 bp, Artificial Sequence
  Synthetic Sequence
ctgacaaacg

SEQ ID NO: 450 - DNA, 10 bp, Artificial Sequence
  Synthetic Sequence
ccctagtccc

SEQ ID NO: 451 - DNA, 10 bp, Artificial Sequence
  Synthetic Sequence
atcaggcgca

SEQ ID NO: 452 - DNA, 10 bp, Artificial Sequence
  Synthetic Sequence
cctcactgag

SEQ ID NO: 453 - DNA, 10 bp, Artificial Sequence
  Synthetic Sequence
cgctatcaga

SEQ ID NO: 454 - DNA, 10 bp, Artificial Sequence
  Synthetic Sequence
aactttattg

SEQ ID NO: 455 - DNA, 10 bp, Artificial Sequence
  Synthetic Sequence
aaatattgct

SEQ ID NO: 456 - DNA, 10 bp, Artificial Sequence
  Synthetic Sequence
aaaccatcaa

SEQ ID NO: 457 - DNA, 10 bp, Artificial Sequence
  Synthetic Sequence
tggagggcag

SEQ ID NO: 458 - DNA, 10 bp, Artificial Sequence
  Synthetic Sequence
accaaggctc

SEQ ID NO: 459 - DNA, 10 bp, Artificial Sequence
  Synthetic Sequence
tataggcatc

SEQ ID NO: 460 - DNA, 10 bp, Artificial Sequence
  Synthetic Sequence
caagaaggta

SEQ ID NO: 461 - DNA, 10 bp, Artificial Sequence
  Synthetic Sequence
gccatggaat

SEQ ID NO: 462 - DNA, 10 bp, Artificial Sequence
  Synthetic Sequence
gcgagttcca

SEQ ID NO: 463 - DNA, 10 bp, Artificial Sequence
  Synthetic Sequence
caccagttgt

SEQ ID NO: 464 - DNA, 10 bp, Artificial Sequence
  Synthetic Sequence
tgcgtgactt

SEQ ID NO: 465 - DNA, 10 bp, Artificial Sequence
  Synthetic Sequence
acccatcgct

SEQ ID NO: 466 - DNA, 10 bp, Artificial Sequence
  Synthetic Sequence
attatttcac

SEQ ID NO: 467 - DNA, 10 bp, Artificial Sequence
  Synthetic Sequence
tttcacgcgg

SEQ ID NO: 468 - DNA, 10 bp, Artificial Sequence
  Synthetic Sequence
ccaacatcga

SEQ ID NO: 469 - DNA, 10 bp, Artificial Sequence
  Synthetic Sequence
ttatatagtc

SEQ ID NO: 470 - DNA, 10 bp, Artificial Sequence
  Synthetic Sequence
aatgctggcg

SEQ ID NO: 471 - DNA, 10 bp, Artificial Sequence
  Synthetic Sequence
actaaacaac

SEQ ID NO: 472 - DNA, 10 bp, Artificial Sequence
  Synthetic Sequence
tgatccactg

SEQ ID NO: 473 - DNA, 10 bp, Artificial Sequence
  Synthetic Sequence
ggcctgcttt

SEQ ID NO: 474 - DNA, 10 bp, Artificial Sequence
  Synthetic Sequence
gagccagtta

SEQ ID NO: 475 - DNA, 10 bp, Artificial Sequence
  Synthetic Sequence
atgtcttgag

SEQ ID NO: 476 - DNA, 10 bp, Artificial Sequence
  Synthetic Sequence
gattcccgca

SEQ ID NO: 477 - DNA, 10 bp, Artificial Sequence
  Synthetic Sequence
catacagact

SEQ ID NO: 478 - DNA, 10 bp, Artificial Sequence
  Synthetic Sequence
gcgtataccg

SEQ ID NO: 479 - DNA, 10 bp, Artificial Sequence
  Synthetic Sequence
agtaactgtc

SEQ ID NO: 480 - DNA, 10 bp, Artificial Sequence
  Synthetic Sequence
ttaacctaca

SEQ ID NO: 481 - DNA, 10 bp, Artificial Sequence
  Synthetic Sequence
tcgatcgact

SEQ ID NO: 482 - DNA, 10 bp, Artificial Sequence
  Synthetic Sequence
gacggacgag

SEQ ID NO: 483 - DNA, 10 bp, Artificial Sequence
  Synthetic Sequence
gcgcactctt

SEQ ID NO: 484 - DNA, 10 bp, Artificial Sequence
  Synthetic Sequence
gcaattacgt

SEQ ID NO: 485 - DNA, 10 bp, Artificial Sequence
  Synthetic Sequence
caataacaat

SEQ ID NO: 486 - DNA, 10 bp, Artificial Sequence
  Synthetic Sequence
ttgctaatcc

SEQ ID NO: 487 - DNA, 10 bp, Artificial Sequence
  Synthetic Sequence
tcattcacgt

SEQ ID NO: 488 - DNA, 10 bp, Artificial Sequence
  Synthetic Sequence
gagttagcga

SEQ ID NO: 489 - DNA, 10 bp, Artificial Sequence
  Synthetic Sequence
aattgatgcc

SEQ ID NO: 490 - DNA, 10 bp, Artificial Sequence
  Synthetic Sequence
tgcgcgagta

SEQ ID NO: 491 - DNA, 10 bp, Artificial Sequence
  Synthetic Sequence
ggaagtcgca

SEQ ID NO: 492 - DNA, 10 bp, Artificial Sequence
  Synthetic Sequence
tatttcccgg

SEQ ID NO: 493 - DNA, 10 bp, Artificial Sequence
  Synthetic Sequence
aaactacctg

SEQ ID NO: 494 - DNA, 10 bp, Artificial Sequence
  Synthetic Sequence
gcagtgagaa

SEQ ID NO: 495 - DNA, 10 bp, Artificial Sequence
  Synthetic Sequence
ccgataggaa

SEQ ID NO: 496 - DNA, 10 bp, Artificial Sequence
  Synthetic Sequence
gcaagcggta

SEQ ID NO: 497 - DNA, 10 bp, Artificial Sequence
  Synthetic Sequence
tcgacctctg

SEQ ID NO: 498 - DNA, 10 bp, Artificial Sequence
  Synthetic Sequence
ttgcccttca

SEQ ID NO: 499 - DNA, 10 bp, Artificial Sequence
  Synthetic Sequence
ttccctagtt

SEQ ID NO: 500 - DNA, 10 bp, Artificial Sequence
  Synthetic Sequence
cacctggttc

SEQ ID NO: 501 - DNA, 10 bp, Artificial Sequence
  Synthetic Sequence
gctgtcgcaa

SEQ ID NO: 502 - DNA, 10 bp, Artificial Sequence
  Synthetic Sequence
acgatgtgtg

SEQ ID NO: 503 - DNA, 10 bp, Artificial Sequence
  Synthetic Sequence
gagcaattgg

SEQ ID NO: 504 - DNA, 10 bp, Artificial Sequence
  Synthetic Sequence
ttaaagcctg

SEQ ID NO: 505 - DNA, 10 bp, Artificial Sequence
  Synthetic Sequence
atcaattctt

SEQ ID NO: 506 - DNA, 10 bp, Artificial Sequence
  Synthetic Sequence
acatatttag

SEQ ID NO: 507 - DNA, 10 bp, Artificial Sequence
  Synthetic Sequence
cggataccaa

SEQ ID NO: 508 - DNA, 10 bp, Artificial Sequence
  Synthetic Sequence
cttaatcgat

SEQ ID NO: 509 - DNA, 10 bp, Artificial Sequence
  Synthetic Sequence
cgtacacaca

SEQ ID NO: 510 - DNA, 10 bp, Artificial Sequence
  Synthetic Sequence
atacagaccg

SEQ ID NO: 511 - DNA, 10 bp, Artificial Sequence
  Synthetic Sequence
aattgtttgg

SEQ ID NO: 512 - DNA, 10 bp, Artificial Sequence
  Synthetic Sequence
cgctatacaa

SEQ ID NO: 513 - DNA, 10 bp, Artificial Sequence
  Synthetic Sequence
tgctcacgta

SEQ ID NO: 514 - DNA, 10 bp, Artificial Sequence
  Synthetic Sequence
agaggcgact

SEQ ID NO: 515 - DNA, 10 bp, Artificial Sequence
  Synthetic Sequence
aagggaggta

SEQ ID NO: 516 - DNA, 10 bp, Artificial Sequence
  Synthetic Sequence
ttatcatttg

SEQ ID NO: 517 - DNA, 10 bp, Artificial Sequence
  Synthetic Sequence
tgccacctac

SEQ ID NO: 518 - DNA, 10 bp, Artificial Sequence
  Synthetic Sequence
cagatcatag

SEQ ID NO: 519 - DNA, 10 bp, Artificial Sequence
  Synthetic Sequence
cgcattgcac

SEQ ID NO: 520 - DNA, 10 bp, Artificial Sequence
  Synthetic Sequence
cataacattc

SEQ ID NO: 521 - DNA, 10 bp, Artificial Sequence
  Synthetic Sequence
aacaggcatg

SEQ ID NO: 522 - DNA, 10 bp, Artificial Sequence
  Synthetic Sequence
agcaacatcg

SEQ ID NO: 523 - DNA, 10 bp, Artificial Sequence
  Synthetic Sequence
aatagtacct

SEQ ID NO: 524 - DNA, 10 bp, Artificial Sequence
  Synthetic Sequence
taaatctcag

SEQ ID NO: 525 - DNA, 10 bp, Artificial Sequence
  Synthetic Sequence
atcagggttg

SEQ ID NO: 526 - DNA, 10 bp, Artificial Sequence
  Synthetic Sequence
aactattaga

SEQ ID NO: 527 - DNA, 10 bp, Artificial Sequence
  Synthetic Sequence
tcgaagttga

SEQ ID NO: 528 - DNA, 10 bp, Artificial Sequence
  Synthetic Sequence
gaccttgtca

SEQ ID NO: 529 - DNA, 10 bp, Artificial Sequence
  Synthetic Sequence
gtcatgcagt

SEQ ID NO: 530 - DNA, 10 bp, Artificial Sequence
  Synthetic Sequence
atgttctgaa

SEQ ID NO: 531 - DNA, 10 bp, Artificial Sequence
  Synthetic Sequence
aatccgaaag

SEQ ID NO: 532 - DNA, 10 bp, Artificial Sequence
  Synthetic Sequence
tcatgtttct

SEQ ID NO: 533 - DNA, 10 bp, Artificial Sequence
  Synthetic Sequence
tctcgagcag

SEQ ID NO: 534 - DNA, 10 bp, Artificial Sequence
  Synthetic Sequence
acttgttcat

SEQ ID NO: 535 - DNA, 10 bp, Artificial Sequence
  Synthetic Sequence
tgtcgcgcct

SEQ ID NO: 536 - DNA, 10 bp, Artificial Sequence
  Synthetic Sequence
aggcttctac

SEQ ID NO: 537 - DNA, 10 bp, Artificial Sequence
  Synthetic Sequence
tatacgatcg

SEQ ID NO: 538 - DNA, 10 bp, Artificial Sequence
  Synthetic Sequence
tagtgtaacc

SEQ ID NO: 539 - DNA, 10 bp, Artificial Sequence
  Synthetic Sequence
tgaagtagcg

SEQ ID NO: 540 - DNA, 10 bp, Artificial Sequence
  Synthetic Sequence
ccaggcctat

SEQ ID NO: 541 - DNA, 10 bp, Artificial Sequence
  Synthetic Sequence
tcacaccagg

SEQ ID NO: 542 - DNA, 10 bp, Artificial Sequence
  Synthetic Sequence
aaagagaata

SEQ ID NO: 543 - DNA, 10 bp, Artificial Sequence
  Synthetic Sequence
ctttgagaag

SEQ ID NO: 544 - DNA, 10 bp, Artificial Sequence
  Synthetic Sequence
tataagtctc

SEQ ID NO: 545 - DNA, 10 bp, Artificial Sequence
  Synthetic Sequence
aggaatgccc

SEQ ID NO: 546 - DNA, 10 bp, Artificial Sequence
  Synthetic Sequence
ggtcactggg

SEQ ID NO: 547 - DNA, 10 bp, Artificial Sequence
  Synthetic Sequence
gtcctagatt

SEQ ID NO: 548 - DNA, 10 bp, Artificial Sequence
  Synthetic Sequence
taactcataa

SEQ ID NO: 549 - DNA, 10 bp, Artificial Sequence
  Synthetic Sequence
atatcgatca

SEQ ID NO: 550 - DNA, 10 bp, Artificial Sequence
  Synthetic Sequence
cgggatcgag

SEQ ID NO: 551 - DNA, 10 bp, Artificial Sequence
  Synthetic Sequence
tttgctcttc

SEQ ID NO: 552 - DNA, 10 bp, Artificial Sequence
  Synthetic Sequence
cagtccagtc

SEQ ID NO: 553 - DNA, 10 bp, Artificial Sequence
  Synthetic Sequence
cccatagaag

SEQ ID NO: 554 - DNA, 10 bp, Artificial Sequence
  Synthetic Sequence
gtatgattct

SEQ ID NO: 555 - DNA, 10 bp, Artificial Sequence
  Synthetic Sequence
atcgtccttg

SEQ ID NO: 556 - DNA, 10 bp, Artificial Sequence
  Synthetic Sequence
tctcatacat

SEQ ID NO: 557 - DNA, 10 bp, Artificial Sequence
  Synthetic Sequence
ggaacaacta

SEQ ID NO: 558 - DNA, 10 bp, Artificial Sequence
  Synthetic Sequence
ttgatgcata

SEQ ID NO: 559 - DNA, 10 bp, Artificial Sequence
  Synthetic Sequence
tattcggcct

SEQ ID NO: 560 - DNA, 10 bp, Artificial Sequence
  Synthetic Sequence
cgagcactag

SEQ ID NO: 561 - DNA, 10 bp, Artificial Sequence
  Synthetic Sequence
agttgaatga

SEQ ID NO: 562 - DNA, 10 bp, Artificial Sequence
  Synthetic Sequence
gtcaatatta

SEQ ID NO: 563 - DNA, 10 bp, Artificial Sequence
  Synthetic Sequence
ttgagccgca

SEQ ID NO: 564 - DNA, 10 bp, Artificial Sequence
  Synthetic Sequence
gcacataatc

SEQ ID NO: 565 - DNA, 10 bp, Artificial Sequence
  Synthetic Sequence
gctccaacat

SEQ ID NO: 566 - DNA, 10 bp, Artificial Sequence
  Synthetic Sequence
ttacaacgac

SEQ ID NO: 567 - DNA, 10 bp, Artificial Sequence
  Synthetic Sequence
caaggatccc

SEQ ID NO: 568 - DNA, 10 bp, Artificial Sequence
  Synthetic Sequence
acgtcccgat

SEQ ID NO: 569 - DNA, 10 bp, Artificial Sequence
  Synthetic Sequence
cttcattatg

SEQ ID NO: 570 - DNA, 10 bp, Artificial Sequence
  Synthetic Sequence
atgaccggga

SEQ ID NO: 571 - DNA, 10 bp, Artificial Sequence
  Synthetic Sequence
acaaccattg

SEQ ID NO: 572 - DNA, 10 bp, Artificial Sequence
  Synthetic Sequence
aactgttctt

SEQ ID NO: 573 - DNA, 10 bp, Artificial Sequence
  Synthetic Sequence
ggaggcttta

SEQ ID NO: 574 - DNA, 10 bp, Artificial Sequence
  Synthetic Sequence
caccatgtgc

SEQ ID NO: 575 - DNA, 10 bp, Artificial Sequence
  Synthetic Sequence
accacggtgg

SEQ ID NO: 576 - DNA, 10 bp, Artificial Sequence
  Synthetic Sequence
cccggcttct

SEQ ID NO: 577 - DNA, 10 bp, Artificial Sequence
  Synthetic Sequence
aggctaggaa

SEQ ID NO: 578 - DNA, 10 bp, Artificial Sequence
  Synthetic Sequence
tgccttggcg

SEQ ID NO: 579 - DNA, 10 bp, Artificial Sequence
  Synthetic Sequence
cagtggtgca

SEQ ID NO: 580 - DNA, 10 bp, Artificial Sequence
  Synthetic Sequence
gcagaaacga

SEQ ID NO: 581 - DNA, 10 bp, Artificial Sequence
  Synthetic Sequence
aacctgcgtg

SEQ ID NO: 582 - DNA, 10 bp, Artificial Sequence
  Synthetic Sequence
actcctatgt

SEQ ID NO: 583 - DNA, 10 bp, Artificial Sequence
  Synthetic Sequence
gcgagcttcc

SEQ ID NO: 584 - DNA, 10 bp, Artificial Sequence
  Synthetic Sequence
attacattcc

SEQ ID NO: 585 - DNA, 10 bp, Artificial Sequence
  Synthetic Sequence
gcctttctgg

SEQ ID NO: 586 - DNA, 10 bp, Artificial Sequence
  Synthetic Sequence
acacgggcca

SEQ ID NO: 587 - DNA, 10 bp, Artificial Sequence
  Synthetic Sequence
atgcggaatg

SEQ ID NO: 588 - DNA, 10 bp, Artificial Sequence
  Synthetic Sequence
caggaggatc

SEQ ID NO: 589 - DNA, 10 bp, Artificial Sequence
  Synthetic Sequence
tcacaagtgg

SEQ ID NO: 590 - DNA, 10 bp, Artificial Sequence
  Synthetic Sequence
actgcaatcc

SEQ ID NO: 591 - DNA, 10 bp, Artificial Sequence
  Synthetic Sequence
acagtccgac

SEQ ID NO: 592 - DNA, 10 bp, Artificial Sequence
  Synthetic Sequence
tgagactcgg

SEQ ID NO: 593 - DNA, 10 bp, Artificial Sequence
  Synthetic Sequence
atgaagcaaa

SEQ ID NO: 594 - DNA, 10 bp, Artificial Sequence
  Synthetic Sequence
ctctctacct

SEQ ID NO: 595 - DNA, 10 bp, Artificial Sequence
  Synthetic Sequence
accgagccat

SEQ ID NO: 596 - DNA, 10 bp, Artificial Sequence
  Synthetic Sequence
atagcttggc

SEQ ID NO: 597 - DNA, 10 bp, Artificial Sequence
  Synthetic Sequence
cttggagtgc

SEQ ID NO: 598 - DNA, 10 bp, Artificial Sequence
  Synthetic Sequence
cgataatcag

SEQ ID NO: 599 - DNA, 10 bp, Artificial Sequence
  Synthetic Sequence
acctttagta

SEQ ID NO: 600 - DNA, 10 bp, Artificial Sequence
  Synthetic Sequence
ctaccgtgga

SEQ ID NO: 601 - DNA, 10 bp, Artificial Sequence
  Synthetic Sequence
caggcaatcc

SEQ ID NO: 602 - DNA, 10 bp, Artificial Sequence
  Synthetic Sequence
gataaggtgt

SEQ ID NO: 603 - DNA, 10 bp, Artificial Sequence
  Synthetic Sequence
cgctgtgtca

SEQ ID NO: 604 - DNA, 10 bp, Artificial Sequence
  Synthetic Sequence
ctagtatact

SEQ ID NO: 605 - DNA, 10 bp, Artificial Sequence
  Synthetic Sequence
acaaagttcc

SEQ ID NO: 606 - DNA, 10 bp, Artificial Sequence
  Synthetic Sequence
gccgtcctga

SEQ ID NO: 607 - DNA, 10 bp, Artificial Sequence
  Synthetic Sequence
accgggctct

SEQ ID NO: 608 - DNA, 10 bp, Artificial Sequence
  Synthetic Sequence
ctttactgga

SEQ ID NO: 609 - DNA, 10 bp, Artificial Sequence
  Synthetic Sequence
gaaaccttaa

SEQ ID NO: 610 - DNA, 10 bp, Artificial Sequence
  Synthetic Sequence
gctccggaga

SEQ ID NO: 611 - DNA, 10 bp, Artificial Sequence
  Synthetic Sequence
cgcggaatcg

SEQ ID NO: 612 - DNA, 10 bp, Artificial Sequence
  Synthetic Sequence
ataccgcagc

SEQ ID NO: 613 - DNA, 10 bp, Artificial Sequence
  Synthetic Sequence
ccgtattatt

SEQ ID NO: 614 - DNA, 10 bp, Artificial Sequence
  Synthetic Sequence
ttaggtggca

SEQ ID NO: 615 - DNA, 10 bp, Artificial Sequence
  Synthetic Sequence
tagcgctata

SEQ ID NO: 616 - DNA, 10 bp, Artificial Sequence
  Synthetic Sequence
agatatgagt

SEQ ID NO: 617 - DNA, 10 bp, Artificial Sequence
  Synthetic Sequence
gataaaggca

SEQ ID NO: 618 - DNA, 10 bp, Artificial Sequence
  Synthetic Sequence
gaaacggttt

SEQ ID NO: 619 - DNA, 10 bp, Artificial Sequence
  Synthetic Sequence
ctcattggtg

SEQ ID NO: 620 - DNA, 10 bp, Artificial Sequence
  Synthetic Sequence
tgcatctaat

SEQ ID NO: 621 - DNA, 10 bp, Artificial Sequence
  Synthetic Sequence
ctgctacccg

SEQ ID NO: 622 - DNA, 10 bp, Artificial Sequence
  Synthetic Sequence
ccatagtcaa

SEQ ID NO: 623 - DNA, 10 bp, Artificial Sequence
  Synthetic Sequence
gacgcagtgg

SEQ ID NO: 624 - DNA, 10 bp, Artificial Sequence
  Synthetic Sequence
agcaggagga

SEQ ID NO: 625 - DNA, 10 bp, Artificial Sequence
  Synthetic Sequence
tctgtccgct

SEQ ID NO: 626 - DNA, 10 bp, Artificial Sequence
  Synthetic Sequence
gcgcgatgca

SEQ ID NO: 627 - DNA, 10 bp, Artificial Sequence
  Synthetic Sequence
aaacaactag

SEQ ID NO: 628 - DNA, 10 bp, Artificial Sequence
  Synthetic Sequence
tgtacgcggg

SEQ ID NO: 629 - DNA, 10 bp, Artificial Sequence
  Synthetic Sequence
agtgctagat

SEQ ID NO: 630 - DNA, 10 bp, Artificial Sequence
  Synthetic Sequence
gtagacgatt

SEQ ID NO: 631 - DNA, 10 bp, Artificial Sequence
  Synthetic Sequence
acaggctgga

SEQ ID NO: 632 - DNA, 10 bp, Artificial Sequence
  Synthetic Sequence
ccatggtgtc

SEQ ID NO: 633 - DNA, 10 bp, Artificial Sequence
  Synthetic Sequence
ggaggcagac

SEQ ID NO: 634 - DNA, 10 bp, Artificial Sequence
  Synthetic Sequence
acaccaaagt

SEQ ID NO: 635 - DNA, 10 bp, Artificial Sequence
  Synthetic Sequence
agtttccgtt

SEQ ID NO: 636 - DNA, 10 bp, Artificial Sequence
  Synthetic Sequence
gcttgatggc

SEQ ID NO: 637 - DNA, 10 bp, Artificial Sequence
  Synthetic Sequence
tttacactgg

SEQ ID NO: 638 - DNA, 10 bp, Artificial Sequence
  Synthetic Sequence
ttccggaaga

SEQ ID NO: 639 - DNA, 10 bp, Artificial Sequence
  Synthetic Sequence
atagtctaag

SEQ ID NO: 640 - DNA, 10 bp, Artificial Sequence
  Synthetic Sequence
gatgaccctg

SEQ ID NO: 641 - DNA, 10 bp, Artificial Sequence
  Synthetic Sequence
ttaggagcaa

SEQ ID NO: 642 - DNA, 10 bp, Artificial Sequence
  Synthetic Sequence
tatcatagtg

SEQ ID NO: 643 - DNA, 10 bp, Artificial Sequence
  Synthetic Sequence
ttggcaattg

SEQ ID NO: 644 - DNA, 10 bp, Artificial Sequence
  Synthetic Sequence
atcaactaag

SEQ ID NO: 645 - DNA, 10 bp, Artificial Sequence
  Synthetic Sequence
catatatgtc

SEQ ID NO: 646 - DNA, 10 bp, Artificial Sequence
  Synthetic Sequence
gaatcccagt

SEQ ID NO: 647 - DNA, 10 bp, Artificial Sequence
  Synthetic Sequence
gatgatcttt

SEQ ID NO: 648 - DNA, 10 bp, Artificial Sequence
  Synthetic Sequence
atccgacaaa

SEQ ID NO: 649 - DNA, 10 bp, Artificial Sequence
  Synthetic Sequence
gagagttacc

SEQ ID NO: 650 - DNA, 10 bp, Artificial Sequence
  Synthetic Sequence
ttgttggagt

SEQ ID NO: 651 - DNA, 10 bp, Artificial Sequence
  Synthetic Sequence
ggcgccagaa

SEQ ID NO: 652 - DNA, 10 bp, Artificial Sequence
  Synthetic Sequence
aggtcctgcc

SEQ ID NO: 653 - DNA, 10 bp, Artificial Sequence
  Synthetic Sequence
gtcttcggaa

SEQ ID NO: 654 - DNA, 10 bp, Artificial Sequence
  Synthetic Sequence
acagcttctc

SEQ ID NO: 655 - DNA, 10 bp, Artificial Sequence
  Synthetic Sequence
ctccagaccc

SEQ ID NO: 656 - DNA, 10 bp, Artificial Sequence
  Synthetic Sequence
atacctcgac

SEQ ID NO: 657 - DNA, 10 bp, Artificial Sequence
  Synthetic Sequence
cacttgacct

SEQ ID NO: 658 - DNA, 10 bp, Artificial Sequence
  Synthetic Sequence
agcttagggc

SEQ ID NO: 659 - DNA, 10 bp, Artificial Sequence
  Synthetic Sequence
ccgacacacc

SEQ ID NO: 660 - DNA, 10 bp, Artificial Sequence
  Synthetic Sequence
ggtttcaaga

SEQ ID NO: 661 - DNA, 10 bp, Artificial Sequence
  Synthetic Sequence
tctggtgcgc

SEQ ID NO: 662 - DNA, 10 bp, Artificial Sequence
  Synthetic Sequence
atcccagtag

SEQ ID NO: 663 - DNA, 10 bp, Artificial Sequence
  Synthetic Sequence
ttctcatggt

SEQ ID NO: 664 - DNA, 10 bp, Artificial Sequence
  Synthetic Sequence
ttcaagttct

SEQ ID NO: 665 - DNA, 10 bp, Artificial Sequence
  Synthetic Sequence
tagcccaacc

SEQ ID NO: 666 - DNA, 10 bp, Artificial Sequence
  Synthetic Sequence
cctcgaggaa

SEQ ID NO: 667 - DNA, 10 bp, Artificial Sequence
  Synthetic Sequence
aacagagtac

SEQ ID NO: 668 - DNA, 10 bp, Artificial Sequence
  Synthetic Sequence
cgttattgtg

SEQ ID NO: 669 - DNA, 10 bp, Artificial Sequence
  Synthetic Sequence
gtgacgctag

SEQ ID NO: 670 - DNA, 10 bp, Artificial Sequence
  Synthetic Sequence
ttaggctatt

SEQ ID NO: 671 - DNA, 10 bp, Artificial Sequence
  Synthetic Sequence
gtagcgcatt

SEQ ID NO: 672 - DNA, 10 bp, Artificial Sequence
  Synthetic Sequence
ctacacaggt

SEQ ID NO: 673 - DNA, 10 bp, Artificial Sequence
  Synthetic Sequence
tttcgacgag

SEQ ID NO: 674 - DNA, 10 bp, Artificial Sequence
  Synthetic Sequence
cttatacaac

SEQ ID NO: 675 - DNA, 10 bp, Artificial Sequence
  Synthetic Sequence
ttgctataaa

SEQ ID NO: 676 - DNA, 10 bp, Artificial Sequence
  Synthetic Sequence
taatatgcag

SEQ ID NO: 677 - DNA, 10 bp, Artificial Sequence
  Synthetic Sequence
acttctccta

SEQ ID NO: 678 - DNA, 10 bp, Artificial Sequence
  Synthetic Sequence
tgacacatga

SEQ ID NO: 679 - DNA, 10 bp, Artificial Sequence
  Synthetic Sequence
tgcgtccgaa

SEQ ID NO: 680 - DNA, 10 bp, Artificial Sequence
  Synthetic Sequence
cctggaaaca

SEQ ID NO: 681 - DNA, 10 bp, Artificial Sequence
  Synthetic Sequence
aaggacaccg

SEQ ID NO: 682 - DNA, 10 bp, Artificial Sequence
  Synthetic Sequence
aatcggcgat

SEQ ID NO: 683 - DNA, 10 bp, Artificial Sequence
  Synthetic Sequence
ctgaaacatt

SEQ ID NO: 684 - DNA, 10 bp, Artificial Sequence
  Synthetic Sequence
aggatctaaa

SEQ ID NO: 685 - DNA, 10 bp, Artificial Sequence
  Synthetic Sequence
gaaaggctac

SEQ ID NO: 686 - DNA, 10 bp, Artificial Sequence
  Synthetic Sequence
agtccactta

SEQ ID NO: 687 - DNA, 10 bp, Artificial Sequence
  Synthetic Sequence
tgagacctaa

SEQ ID NO: 688 - DNA, 10 bp, Artificial Sequence
  Synthetic Sequence
gataagcgag

SEQ ID NO: 689 - DNA, 10 bp, Artificial Sequence
  Synthetic Sequence
aaattatcac

SEQ ID NO: 690 - DNA, 10 bp, Artificial Sequence
  Synthetic Sequence
gggacactgg

SEQ ID NO: 691 - DNA, 10 bp, Artificial Sequence
  Synthetic Sequence
cgtgcgtaag

SEQ ID NO: 692 - DNA, 10 bp, Artificial Sequence
  Synthetic Sequence
aatttgtcgg

SEQ ID NO: 693 - DNA, 10 bp, Artificial Sequence
  Synthetic Sequence
gaagcctctt

SEQ ID NO: 694 - DNA, 10 bp, Artificial Sequence
  Synthetic Sequence
gtcgccatac

SEQ ID NO: 695 - DNA, 10 bp, Artificial Sequence
  Synthetic Sequence
gtcagtcata

SEQ ID NO: 696 - DNA, 10 bp, Artificial Sequence
  Synthetic Sequence
cggcataagc

SEQ ID NO: 697 - DNA, 10 bp, Artificial Sequence
  Synthetic Sequence
atggcgctaa

SEQ ID NO: 698 - DNA, 10 bp, Artificial Sequence
  Synthetic Sequence
tgaaatctct

SEQ ID NO: 699 - DNA, 10 bp, Artificial Sequence
  Synthetic Sequence
gagtgaatcc

SEQ ID NO: 700 - DNA, 10 bp, Artificial Sequence
  Synthetic Sequence
tgataggacg

SEQ ID NO: 701 - DNA, 10 bp, Artificial Sequence
  Synthetic Sequence
ctatactcgg

SEQ ID NO: 702 - DNA, 10 bp, Artificial Sequence
  Synthetic Sequence
cgaaggccaa

SEQ ID NO: 703 - DNA, 10 bp, Artificial Sequence
  Synthetic Sequence
gctactagat

SEQ ID NO: 704 - DNA, 10 bp, Artificial Sequence
  Synthetic Sequence
ctcgtcacaa

SEQ ID NO: 705 - DNA, 10 bp, Artificial Sequence
  Synthetic Sequence
tattgggcac

SEQ ID NO: 706 - DNA, 10 bp, Artificial Sequence
  Synthetic Sequence
tagcaataag

SEQ ID NO: 707 - DNA, 10 bp, Artificial Sequence
  Synthetic Sequence
atcgactaga

SEQ ID NO: 708 - DNA, 10 bp, Artificial Sequence
  Synthetic Sequence
tgacaagcta

SEQ ID NO: 709 - DNA, 10 bp, Artificial Sequence
  Synthetic Sequence
tcatcgtaag

SEQ ID NO: 710 - DNA, 10 bp, Artificial Sequence
  Synthetic Sequence
tcgggacgtc

SEQ ID NO: 711 - DNA, 10 bp, Artificial Sequence
  Synthetic Sequence
atctcatgca

SEQ ID NO: 712 - DNA, 10 bp, Artificial Sequence
  Synthetic Sequence
tgaatggata

SEQ ID NO: 713 - DNA, 10 bp, Artificial Sequence
  Synthetic Sequence
ggacctcaca

SEQ ID NO: 714 - DNA, 10 bp, Artificial Sequence
  Synthetic Sequence
agtgcggtct

SEQ ID NO: 715 - DNA, 10 bp, Artificial Sequence
  Synthetic Sequence
cgagatggat

SEQ ID NO: 716 - DNA, 10 bp, Artificial Sequence
  Synthetic Sequence
ataatttatg

SEQ ID NO: 717 - DNA, 10 bp, Artificial Sequence
  Synthetic Sequence
ccgcgcaagt

SEQ ID NO: 718 - DNA, 10 bp, Artificial Sequence
  Synthetic Sequence
atcggagtgg

SEQ ID NO: 719 - DNA, 10 bp, Artificial Sequence
  Synthetic Sequence
atgagttccg

SEQ ID NO: 720 - DNA, 10 bp, Artificial Sequence
  Synthetic Sequence
caacaatccg

SEQ ID NO: 721 - DNA, 10 bp, Artificial Sequence
  Synthetic Sequence
atgacctatg

SEQ ID NO: 722 - DNA, 10 bp, Artificial Sequence
  Synthetic Sequence
aacgatagag

SEQ ID NO: 723 - DNA, 10 bp, Artificial Sequence
  Synthetic Sequence
gaggaacacc

SEQ ID NO: 724 - DNA, 10 bp, Artificial Sequence
  Synthetic Sequence
ggcactaggg

SEQ ID NO: 725 - DNA, 10 bp, Artificial Sequence
  Synthetic Sequence
atcgattgaa

SEQ ID NO: 726 - DNA, 10 bp, Artificial Sequence
  Synthetic Sequence
tgtcaacaat

SEQ ID NO: 727 - DNA, 10 bp, Artificial Sequence
  Synthetic Sequence
ctagaacaca

SEQ ID NO: 728 - DNA, 10 bp, Artificial Sequence
  Synthetic Sequence
tatgttgccg

SEQ ID NO: 729 - DNA, 10 bp, Artificial Sequence
  Synthetic Sequence
attctaatca

SEQ ID NO: 730 - DNA, 10 bp, Artificial Sequence
  Synthetic Sequence
cacattagtt

SEQ ID NO: 731 - DNA, 10 bp, Artificial Sequence
  Synthetic Sequence
tctcgccagt

SEQ ID NO: 732 - DNA, 10 bp, Artificial Sequence
  Synthetic Sequence
tcgtaggttc

SEQ ID NO: 733 - DNA, 10 bp, Artificial Sequence
  Synthetic Sequence
agactgggat

SEQ ID NO: 734 - DNA, 10 bp, Artificial Sequence
  Synthetic Sequence
taatcgggtg

SEQ ID NO: 735 - DNA, 10 bp, Artificial Sequence
  Synthetic Sequence
ttggccgggt

SEQ ID NO: 736 - DNA, 10 bp, Artificial Sequence
  Synthetic Sequence
aataccatgc

SEQ ID NO: 737 - DNA, 10 bp, Artificial Sequence
  Synthetic Sequence
cagacaacta

SEQ ID NO: 738 - DNA, 10 bp, Artificial Sequence
  Synthetic Sequence
tatcgcgtcg

SEQ ID NO: 739 - DNA, 10 bp, Artificial Sequence
  Synthetic Sequence
tgtttctggt

SEQ ID NO: 740 - DNA, 10 bp, Artificial Sequence
  Synthetic Sequence
ttccggatac

SEQ ID NO: 741 - DNA, 10 bp, Artificial Sequence
  Synthetic Sequence
gactgcggta

SEQ ID NO: 742 - DNA, 10 bp, Artificial Sequence
  Synthetic Sequence
ttcgacgaaa

SEQ ID NO: 743 - DNA, 10 bp, Artificial Sequence
  Synthetic Sequence
cgaaagatac

SEQ ID NO: 744 - DNA, 10 bp, Artificial Sequence
  Synthetic Sequence
aggtttggtg

SEQ ID NO: 745 - DNA, 10 bp, Artificial Sequence
  Synthetic Sequence
cgtgtcatcc

SEQ ID NO: 746 - DNA, 10 bp, Artificial Sequence
  Synthetic Sequence
caatatatgg

SEQ ID NO: 747 - DNA, 10 bp, Artificial Sequence
  Synthetic Sequence
ggcaactgtt

SEQ ID NO: 748 - DNA, 10 bp, Artificial Sequence
  Synthetic Sequence
tgcggaccct

SEQ ID NO: 749 - DNA, 10 bp, Artificial Sequence
  Synthetic Sequence
acaaatcgat

SEQ ID NO: 750 - DNA, 10 bp, Artificial Sequence
  Synthetic Sequence
ccgatctgag

SEQ ID NO: 751 - DNA, 10 bp, Artificial Sequence
  Synthetic Sequence
ttcgtaagtc

SEQ ID NO: 752 - DNA, 10 bp, Artificial Sequence
  Synthetic Sequence
gctgtaggtt

SEQ ID NO: 753 - DNA, 10 bp, Artificial Sequence
  Synthetic Sequence
tcgatgggac

SEQ ID NO: 754 - DNA, 10 bp, Artificial Sequence
  Synthetic Sequence
agggtgaagc

SEQ ID NO: 755 - DNA, 10 bp, Artificial Sequence
  Synthetic Sequence
aacacaagtg

SEQ ID NO: 756 - DNA, 10 bp, Artificial Sequence
  Synthetic Sequence
ccgacctgtc

SEQ ID NO: 757 - DNA, 10 bp, Artificial Sequence
  Synthetic Sequence
atccaagacg

SEQ ID NO: 758 - DNA, 10 bp, Artificial Sequence
  Synthetic Sequence
tactctatat

SEQ ID NO: 759 - DNA, 10 bp, Artificial Sequence
  Synthetic Sequence
gccctccgtt

SEQ ID NO: 760 - DNA, 10 bp, Artificial Sequence
  Synthetic Sequence
tcagccgact

SEQ ID NO: 761 - DNA, 10 bp, Artificial Sequence
  Synthetic Sequence
acgtatgtgc

SEQ ID NO: 762 - DNA, 10 bp, Artificial Sequence
  Synthetic Sequence
tccgttgtta

SEQ ID NO: 763 - DNA, 10 bp, Artificial Sequence
  Synthetic Sequence
tccgtagccc

SEQ ID NO: 764 - DNA, 10 bp, Artificial Sequence
  Synthetic Sequence
cagctactat

SEQ ID NO: 765 - DNA, 10 bp, Artificial Sequence
  Synthetic Sequence
tttgatcaat

SEQ ID NO: 766 - DNA, 10 bp, Artificial Sequence
  Synthetic Sequence
aaatggtctg

SEQ ID NO: 767 - DNA, 10 bp, Artificial Sequence
  Synthetic Sequence
tgtttattga

SEQ ID NO: 768 - DNA, 10 bp, Artificial Sequence
  Synthetic Sequence
tcccggacct

SEQ ID NO: 769 - DNA, 10 bp, Artificial Sequence
  Synthetic Sequence
aagattcgtg

SEQ ID NO: 770 - DNA, 10 bp, Artificial Sequence
  Synthetic Sequence
ctacaggacc

SEQ ID NO: 771 - DNA, 10 bp, Artificial Sequence
  Synthetic Sequence
aattgaagag

SEQ ID NO: 772 - DNA, 10 bp, Artificial Sequence
  Synthetic Sequence
agctttggaa

SEQ ID NO: 773 - DNA, 10 bp, Artificial Sequence
  Synthetic Sequence
gcttagattc

SEQ ID NO: 774 - DNA, 10 bp, Artificial Sequence
  Synthetic Sequence
gcaatgcgat

SEQ ID NO: 775 - DNA, 10 bp, Artificial Sequence
  Synthetic Sequence
gtatttgacg

SEQ ID NO: 776 - DNA, 10 bp, Artificial Sequence
  Synthetic Sequence
tccctgaatt

SEQ ID NO: 777 - DNA, 10 bp, Artificial Sequence
  Synthetic Sequence
tcttctacca

SEQ ID NO: 778 - DNA, 10 bp, Artificial Sequence
  Synthetic Sequence
cacatgaaat

SEQ ID NO: 779 - DNA, 10 bp, Artificial Sequence
  Synthetic Sequence
ttgcgaggta

SEQ ID NO: 780 - DNA, 10 bp, Artificial Sequence
  Synthetic Sequence
cagatgccct

SEQ ID NO: 781 - DNA, 10 bp, Artificial Sequence
  Synthetic Sequence
tttccaaacc

SEQ ID NO: 782 - DNA, 10 bp, Artificial Sequence
  Synthetic Sequence
tcgcctaggc

SEQ ID NO: 783 - DNA, 10 bp, Artificial Sequence
  Synthetic Sequence
tgttgaaccc

SEQ ID NO: 784 - DNA, 10 bp, Artificial Sequence
  Synthetic Sequence
tcaccaactt

SEQ ID NO: 785 - DNA, 10 bp, Artificial Sequence
  Synthetic Sequence
tgcatcatac

SEQ ID NO: 786 - DNA, 10 bp, Artificial Sequence
  Synthetic Sequence
attcgaggga

SEQ ID NO: 787 - DNA, 10 bp, Artificial Sequence
  Synthetic Sequence
atgtcgtcgg

SEQ ID NO: 788 - DNA, 10 bp, Artificial Sequence
  Synthetic Sequence
ccaagccacg

SEQ ID NO: 789 - DNA, 10 bp, Artificial Sequence
  Synthetic Sequence
actacaagga

SEQ ID NO: 790 - DNA, 10 bp, Artificial Sequence
  Synthetic Sequence
gttagaataa

SEQ ID NO: 791 - DNA, 10 bp, Artificial Sequence
  Synthetic Sequence
gcattgagcc

SEQ ID NO: 792 - DNA, 10 bp, Artificial Sequence
  Synthetic Sequence
ggtttaccca

SEQ ID NO: 793 - DNA, 10 bp, Artificial Sequence
  Synthetic Sequence
accaggtata

SEQ ID NO: 794 - DNA, 10 bp, Artificial Sequence
  Synthetic Sequence
gctttgacgc

SEQ ID NO: 795 - DNA, 10 bp, Artificial Sequence
  Synthetic Sequence
ctcgcttgtg

SEQ ID NO: 796 - DNA, 10 bp, Artificial Sequence
  Synthetic Sequence
ggagggtctc

SEQ ID NO: 797 - DNA, 10 bp, Artificial Sequence
  Synthetic Sequence
ggctgactcg

SEQ ID NO: 798 - DNA, 10 bp, Artificial Sequence
  Synthetic Sequence
gaccaacatt

SEQ ID NO: 799 - DNA, 10 bp, Artificial Sequence
  Synthetic Sequence
gggatgtcac

SEQ ID NO: 800 - DNA, 10 bp, Artificial Sequence
  Synthetic Sequence
ttgtctttgg

SEQ ID NO: 801 - DNA, 10 bp, Artificial Sequence
  Synthetic Sequence
ctaagtttag

SEQ ID NO: 802 - DNA, 10 bp, Artificial Sequence
  Synthetic Sequence
ggctagttaa

SEQ ID NO: 803 - DNA, 10 bp, Artificial Sequence
  Synthetic Sequence
cttattgcga

SEQ ID NO: 804 - DNA, 10 bp, Artificial Sequence
  Synthetic Sequence
gacagatatt

SEQ ID NO: 805 - DNA, 10 bp, Artificial Sequence
  Synthetic Sequence
gtaagtgtat

SEQ ID NO: 806 - DNA, 10 bp, Artificial Sequence
  Synthetic Sequence
aaccgggagc

SEQ ID NO: 807 - DNA, 10 bp, Artificial Sequence
  Synthetic Sequence
atcggaacca

SEQ ID NO: 808 - DNA, 10 bp, Artificial Sequence
  Synthetic Sequence
tactggtccc

SEQ ID NO: 809 - DNA, 10 bp, Artificial Sequence
  Synthetic Sequence
actgcaccaa

SEQ ID NO: 810 - DNA, 10 bp, Artificial Sequence
  Synthetic Sequence
atgattaggc

SEQ ID NO: 811 - DNA, 10 bp, Artificial Sequence
  Synthetic Sequence
acctctaagc

SEQ ID NO: 812 - DNA, 10 bp, Artificial Sequence
  Synthetic Sequence
aggcgattag

SEQ ID NO: 813 - DNA, 10 bp, Artificial Sequence
  Synthetic Sequence
cgtcatgtcc

SEQ ID NO: 814 - DNA, 10 bp, Artificial Sequence
  Synthetic Sequence
tatatgaata

SEQ ID NO: 815 - DNA, 10 bp, Artificial Sequence
  Synthetic Sequence
tttggtgtcc

SEQ ID NO: 816 - DNA, 10 bp, Artificial Sequence
  Synthetic Sequence
cctgcctagg

SEQ ID NO: 817 - DNA, 10 bp, Artificial Sequence
  Synthetic Sequence
acggagtcaa

SEQ ID NO: 818 - DNA, 10 bp, Artificial Sequence
  Synthetic Sequence
acagtacgct

SEQ ID NO: 819 - DNA, 10 bp, Artificial Sequence
  Synthetic Sequence
gcctgataag

SEQ ID NO: 820 - DNA, 10 bp, Artificial Sequence
  Synthetic Sequence
agaagagcac

SEQ ID NO: 821 - DNA, 10 bp, Artificial Sequence
  Synthetic Sequence
tcgttcgtga

SEQ ID NO: 822 - DNA, 10 bp, Artificial Sequence
  Synthetic Sequence
ccaccaacac

SEQ ID NO: 823 - DNA, 10 bp, Artificial Sequence
  Synthetic Sequence
ttgatggtga

SEQ ID NO: 824 - DNA, 10 bp, Artificial Sequence
  Synthetic Sequence
ctcaggtaca

SEQ ID NO: 825 - DNA, 10 bp, Artificial Sequence
  Synthetic Sequence
tttccgccca

SEQ ID NO: 826 - DNA, 10 bp, Artificial Sequence
  Synthetic Sequence
tgaccgagag

SEQ ID NO: 827 - DNA, 10 bp, Artificial Sequence
  Synthetic Sequence
gcggtgtaac

SEQ ID NO: 828 - DNA, 10 bp, Artificial Sequence
  Synthetic Sequence
gtgacccagg

SEQ ID NO: 829 - DNA, 10 bp, Artificial Sequence
  Synthetic Sequence
acctagtaac

SEQ ID NO: 830 - DNA, 10 bp, Artificial Sequence
  Synthetic Sequence
tgggcagact

SEQ ID NO: 831 - DNA, 10 bp, Artificial Sequence
  Synthetic Sequence
tggtggcata

SEQ ID NO: 832 - DNA, 10 bp, Artificial Sequence
  Synthetic Sequence
ttaggaagtt

SEQ ID NO: 833 - DNA, 10 bp, Artificial Sequence
  Synthetic Sequence
tgtacgttca

SEQ ID NO: 834 - DNA, 10 bp, Artificial Sequence
  Synthetic Sequence
gcagatggtt

SEQ ID NO: 835 - DNA, 10 bp, Artificial Sequence
  Synthetic Sequence
aatctgatct

SEQ ID NO: 836 - DNA, 10 bp, Artificial Sequence
  Synthetic Sequence
aagccaaaga

SEQ ID NO: 837 - DNA, 10 bp, Artificial Sequence
  Synthetic Sequence
tcttgggtta

SEQ ID NO: 838 - DNA, 10 bp, Artificial Sequence
  Synthetic Sequence
tcctgcataa

SEQ ID NO: 839 - DNA, 10 bp, Artificial Sequence
  Synthetic Sequence
tttcttgcct

SEQ ID NO: 840 - DNA, 10 bp, Artificial Sequence
  Synthetic Sequence
ttacgttcag

SEQ ID NO: 841 - DNA, 10 bp, Artificial Sequence
  Synthetic Sequence
acaagtgacg

SEQ ID NO: 842 - DNA, 10 bp, Artificial Sequence
  Synthetic Sequence
aatgacgaat

SEQ ID NO: 843 - DNA, 10 bp, Artificial Sequence
  Synthetic Sequence
ttcgcacccg

SEQ ID NO: 844 - DNA, 10 bp, Artificial Sequence
  Synthetic Sequence
agaatatctg

SEQ ID NO: 845 - DNA, 10 bp, Artificial Sequence
  Synthetic Sequence
agatcactgt

SEQ ID NO: 846 - DNA, 10 bp, Artificial Sequence
  Synthetic Sequence
acttgcaaga

SEQ ID NO: 847 - DNA, 10 bp, Artificial Sequence
  Synthetic Sequence
ctcattccgt

SEQ ID NO: 848 - DNA, 10 bp, Artificial Sequence
  Synthetic Sequence
ggttgcggga

SEQ ID NO: 849 - DNA, 10 bp, Artificial Sequence
  Synthetic Sequence
aatagaaatg

SEQ ID NO: 850 - DNA, 10 bp, Artificial Sequence
  Synthetic Sequence
aaaggcagtg

SEQ ID NO: 851 - DNA, 10 bp, Artificial Sequence
  Synthetic Sequence
acctcatatt

SEQ ID NO: 852 - DNA, 10 bp, Artificial Sequence
  Synthetic Sequence
caaatttaga

SEQ ID NO: 853 - DNA, 10 bp, Artificial Sequence
  Synthetic Sequence
tatgcgggat

SEQ ID NO: 854 - DNA, 10 bp, Artificial Sequence
  Synthetic Sequence
gtacccgacc

SEQ ID NO: 855 - DNA, 10 bp, Artificial Sequence
  Synthetic Sequence
gcttcgcgga

SEQ ID NO: 856 - DNA, 10 bp, Artificial Sequence
  Synthetic Sequence
tatgtaggta

SEQ ID NO: 857 - DNA, 10 bp, Artificial Sequence
  Synthetic Sequence
cttcctcagc

SEQ ID NO: 858 - DNA, 10 bp, Artificial Sequence
  Synthetic Sequence
gtccgtacgc

SEQ ID NO: 859 - DNA, 10 bp, Artificial Sequence
  Synthetic Sequence
cacaatcgcc

SEQ ID NO: 860 - DNA, 10 bp, Artificial Sequence
  Synthetic Sequence
acccacagcc

SEQ ID NO: 861 - DNA, 10 bp, Artificial Sequence
  Synthetic Sequence
ttccataatg

SEQ ID NO: 862 - DNA, 10 bp, Artificial Sequence
  Synthetic Sequence
ggaatgagcg

SEQ ID NO: 863 - DNA, 10 bp, Artificial Sequence
  Synthetic Sequence
aagtaccgtg

SEQ ID NO: 864 - DNA, 10 bp, Artificial Sequence
  Synthetic Sequence
tagggtcgac

SEQ ID NO: 865 - DNA, 10 bp, Artificial Sequence
  Synthetic Sequence
ttcacggcct

SEQ ID NO: 866 - DNA, 10 bp, Artificial Sequence
  Synthetic Sequence
caccgtctca

SEQ ID NO: 867 - DNA, 10 bp, Artificial Sequence
  Synthetic Sequence
gacagggagg

SEQ ID NO: 868 - DNA, 10 bp, Artificial Sequence
  Synthetic Sequence
taccgatcgc

SEQ ID NO: 869 - DNA, 10 bp, Artificial Sequence
  Synthetic Sequence
atgcaagctg

SEQ ID NO: 870 - DNA, 10 bp, Artificial Sequence
  Synthetic Sequence
cgctgacttc

SEQ ID NO: 871 - DNA, 10 bp, Artificial Sequence
  Synthetic Sequence
ctgatccaaa

SEQ ID NO: 872 - DNA, 10 bp, Artificial Sequence
  Synthetic Sequence
aggctcgtgc

SEQ ID NO: 873 - DNA, 10 bp, Artificial Sequence
  Synthetic Sequence
tcattgcact

SEQ ID NO: 874 - DNA, 10 bp, Artificial Sequence
  Synthetic Sequence
tcagaagtac

SEQ ID NO: 875 - DNA, 10 bp, Artificial Sequence
  Synthetic Sequence
attgcacatt

SEQ ID NO: 876 - DNA, 10 bp, Artificial Sequence
  Synthetic Sequence
ggacccgagt

SEQ ID NO: 877 - DNA, 10 bp, Artificial Sequence
  Synthetic Sequence
agtaagggaa

SEQ ID NO: 878 - DNA, 10 bp, Artificial Sequence
  Synthetic Sequence
tagcccaggt

SEQ ID NO: 879 - DNA, 10 bp, Artificial Sequence
  Synthetic Sequence
caaggatagt

SEQ ID NO: 880 - DNA, 10 bp, Artificial Sequence
  Synthetic Sequence
agacagggtc

SEQ ID NO: 881 - DNA, 10 bp, Artificial Sequence
  Synthetic Sequence
tttgagctga

SEQ ID NO: 882 - DNA, 10 bp, Artificial Sequence
  Synthetic Sequence
ccgcccgtaa

SEQ ID NO: 883 - DNA, 10 bp, Artificial Sequence
  Synthetic Sequence
gtatcgtccc

SEQ ID NO: 884 - DNA, 10 bp, Artificial Sequence
  Synthetic Sequence
ccataacgtt

SEQ ID NO: 885 - DNA, 10 bp, Artificial Sequence
  Synthetic Sequence
tgacgtctca

SEQ ID NO: 886 - DNA, 10 bp, Artificial Sequence
  Synthetic Sequence
ctctcctcca

SEQ ID NO: 887 - DNA, 10 bp, Artificial Sequence
  Synthetic Sequence
ggtattaggc

SEQ ID NO: 888 - DNA, 10 bp, Artificial Sequence
  Synthetic Sequence
atagttaggg

SEQ ID NO: 889 - DNA, 10 bp, Artificial Sequence
  Synthetic Sequence
ggtaatgtga

SEQ ID NO: 890 - DNA, 10 bp, Artificial Sequence
  Synthetic Sequence
caccctgcag

SEQ ID NO: 891 - DNA, 10 bp, Artificial Sequence
  Synthetic Sequence
cattgtacgg

SEQ ID NO: 892 - DNA, 10 bp, Artificial Sequence
  Synthetic Sequence
atgtgcgccg

SEQ ID NO: 893 - DNA, 10 bp, Artificial Sequence
  Synthetic Sequence
tcaatagcct

SEQ ID NO: 894 - DNA, 10 bp, Artificial Sequence
  Synthetic Sequence
tatagaattc

SEQ ID NO: 895 - DNA, 10 bp, Artificial Sequence
  Synthetic Sequence
cggttacact

SEQ ID NO: 896 - DNA, 10 bp, Artificial Sequence
  Synthetic Sequence
cgaagcagat

SEQ ID NO: 897 - DNA, 10 bp, Artificial Sequence
  Synthetic Sequence
tagtagtata

SEQ ID NO: 898 - DNA, 10 bp, Artificial Sequence
  Synthetic Sequence
atacaagtaa

SEQ ID NO: 899 - DNA, 10 bp, Artificial Sequence
  Synthetic Sequence
cgacttatca

SEQ ID NO: 900 - DNA, 10 bp, Artificial Sequence
  Synthetic Sequence
aggcctaata

SEQ ID NO: 901 - DNA, 10 bp, Artificial Sequence
  Synthetic Sequence
tgcggtactg

SEQ ID NO: 902 - DNA, 10 bp, Artificial Sequence
  Synthetic Sequence
taggacctat

SEQ ID NO: 903 - DNA, 10 bp, Artificial Sequence
  Synthetic Sequence
ggtcaaggtc

SEQ ID NO: 904 - DNA, 10 bp, Artificial Sequence
  Synthetic Sequence
caagcaggcc

SEQ ID NO: 905 - DNA, 10 bp, Artificial Sequence
  Synthetic Sequence
ttattactat

SEQ ID NO: 906 - DNA, 10 bp, Artificial Sequence
  Synthetic Sequence
tcaaatttgg

SEQ ID NO: 907 - DNA, 10 bp, Artificial Sequence
  Synthetic Sequence
tggtactacc

SEQ ID NO: 908 - DNA, 10 bp, Artificial Sequence
  Synthetic Sequence
ttggtggtac

SEQ ID NO: 909 - DNA, 10 bp, Artificial Sequence
  Synthetic Sequence
tcctataccc

SEQ ID NO: 910 - DNA, 10 bp, Artificial Sequence
  Synthetic Sequence
gacaattgtc

SEQ ID NO: 911 - DNA, 10 bp, Artificial Sequence
  Synthetic Sequence
aggtaatgct

SEQ ID NO: 912 - DNA, 10 bp, Artificial Sequence
  Synthetic Sequence
gaactgatcg

SEQ ID NO: 913 - DNA, 10 bp, Artificial Sequence
  Synthetic Sequence
tctcggtatt

SEQ ID NO: 914 - DNA, 10 bp, Artificial Sequence
  Synthetic Sequence
tggacttgca

SEQ ID NO: 915 - DNA, 10 bp, Artificial Sequence
  Synthetic Sequence
taacgaatat

SEQ ID NO: 916 - DNA, 10 bp, Artificial Sequence
  Synthetic Sequence
aggagcatgc

SEQ ID NO: 917 - DNA, 10 bp, Artificial Sequence
  Synthetic Sequence
ctggagaagc

SEQ ID NO: 918 - DNA, 10 bp, Artificial Sequence
  Synthetic Sequence
tcacattaat

SEQ ID NO: 919 - DNA, 10 bp, Artificial Sequence
  Synthetic Sequence
tgttggctct

SEQ ID NO: 920 - DNA, 10 bp, Artificial Sequence
  Synthetic Sequence
cagcctagag

SEQ ID NO: 921 - DNA, 10 bp, Artificial Sequence
  Synthetic Sequence
ctcttgttac

SEQ ID NO: 922 - DNA, 10 bp, Artificial Sequence
  Synthetic Sequence
acatgaacgc

SEQ ID NO: 923 - DNA, 10 bp, Artificial Sequence
  Synthetic Sequence
gaactctggt

SEQ ID NO: 924 - DNA, 10 bp, Artificial Sequence
  Synthetic Sequence
aagcttatgg

SEQ ID NO: 925 - DNA, 10 bp, Artificial Sequence
  Synthetic Sequence
taccggaggt

SEQ ID NO: 926 - DNA, 10 bp, Artificial Sequence
  Synthetic Sequence
gacctgcaag

SEQ ID NO: 927 - DNA, 10 bp, Artificial Sequence
  Synthetic Sequence
ttcttatatt

SEQ ID NO: 928 - DNA, 10 bp, Artificial Sequence
  Synthetic Sequence
cattggaatt

SEQ ID NO: 929 - DNA, 10 bp, Artificial Sequence
  Synthetic Sequence
atgctaagac

SEQ ID NO: 930 - DNA, 10 bp, Artificial Sequence
  Synthetic Sequence
taggaatgtg

SEQ ID NO: 931 - DNA, 10 bp, Artificial Sequence
  Synthetic Sequence
gtatattcac

SEQ ID NO: 932 - DNA, 10 bp, Artificial Sequence
  Synthetic Sequence
gttccacttg

SEQ ID NO: 933 - DNA, 10 bp, Artificial Sequence
  Synthetic Sequence
ctccctgatc

SEQ ID NO: 934 - DNA, 10 bp, Artificial Sequence
  Synthetic Sequence
cccggattga

SEQ ID NO: 935 - DNA, 10 bp, Artificial Sequence
  Synthetic Sequence
cactagggtc

SEQ ID NO: 936 - DNA, 10 bp, Artificial Sequence
  Synthetic Sequence
ctgggctagt

SEQ ID NO: 937 - DNA, 10 bp, Artificial Sequence
  Synthetic Sequence
gaggtgtatt

SEQ ID NO: 938 - DNA, 10 bp, Artificial Sequence
  Synthetic Sequence
gcataatgaa

SEQ ID NO: 939 - DNA, 10 bp, Artificial Sequence
  Synthetic Sequence
taacgtaagg

SEQ ID NO: 940 - DNA, 10 bp, Artificial Sequence
  Synthetic Sequence
actctattct

SEQ ID NO: 941 - DNA, 10 bp, Artificial Sequence
  Synthetic Sequence
gtcattatat

SEQ ID NO: 942 - DNA, 10 bp, Artificial Sequence
  Synthetic Sequence
tcagtcgtat

SEQ ID NO: 943 - DNA, 10 bp, Artificial Sequence
  Synthetic Sequence
tccatggaga

SEQ ID NO: 944 - DNA, 10 bp, Artificial Sequence
  Synthetic Sequence
tctacccaga

SEQ ID NO: 945 - DNA, 10 bp, Artificial Sequence
  Synthetic Sequence
cataagatgg

SEQ ID NO: 946 - DNA, 10 bp, Artificial Sequence
  Synthetic Sequence
tgatcgtaga

SEQ ID NO: 947 - DNA, 10 bp, Artificial Sequence
  Synthetic Sequence
cagagtgaca

SEQ ID NO: 948 - DNA, 10 bp, Artificial Sequence
  Synthetic Sequence
ctatcgggaa

SEQ ID NO: 949 - DNA, 10 bp, Artificial Sequence
  Synthetic Sequence
aggcttcccg

SEQ ID NO: 950 - DNA, 10 bp, Artificial Sequence
  Synthetic Sequence
acagctgtgg

SEQ ID NO: 951 - DNA, 10 bp, Artificial Sequence
  Synthetic Sequence
gactcatagc

SEQ ID NO: 952 - DNA, 10 bp, Artificial Sequence
  Synthetic Sequence
gtcgcgtagg

SEQ ID NO: 953 - DNA, 10 bp, Artificial Sequence
  Synthetic Sequence
aaggagctgc

SEQ ID NO: 954 - DNA, 10 bp, Artificial Sequence
  Synthetic Sequence
ttgtacttat

SEQ ID NO: 955 - DNA, 10 bp, Artificial Sequence
  Synthetic Sequence
ttccacagta

SEQ ID NO: 956 - DNA, 10 bp, Artificial Sequence
  Synthetic Sequence
tgtactggtt

SEQ ID NO: 957 - DNA, 10 bp, Artificial Sequence
  Synthetic Sequence
cggtgttctc

SEQ ID NO: 958 - DNA, 10 bp, Artificial Sequence
  Synthetic Sequence
tctcgaatgg

SEQ ID NO: 959 - DNA, 10 bp, Artificial Sequence
  Synthetic Sequence
cgtttagacc

SEQ ID NO: 960 - DNA, 10 bp, Artificial Sequence
  Synthetic Sequence
gtggttcgta

SEQ ID NO: 961 - DNA, 10 bp, Artificial Sequence
  Synthetic Sequence
tatgtagtag

SEQ ID NO: 962 - DNA, 10 bp, Artificial Sequence
  Synthetic Sequence
ctcagtatcg

SEQ ID NO: 963 - DNA, 10 bp, Artificial Sequence
  Synthetic Sequence
ggctcgtctc

SEQ ID NO: 964 - DNA, 10 bp, Artificial Sequence
  Synthetic Sequence
tcatcaccgc

SEQ ID NO: 965 - DNA, 10 bp, Artificial Sequence
  Synthetic Sequence
tgggtgtcag

SEQ ID NO: 966 - DNA, 10 bp, Artificial Sequence
  Synthetic Sequence
atggccgctt

SEQ ID NO: 967 - DNA, 10 bp, Artificial Sequence
  Synthetic Sequence
cggtattgat

SEQ ID NO: 968 - DNA, 10 bp, Artificial Sequence
  Synthetic Sequence
catcatgaaa

SEQ ID NO: 969 - DNA, 10 bp, Artificial Sequence
  Synthetic Sequence
gcgactcctc

SEQ ID NO: 970 - DNA, 10 bp, Artificial Sequence
  Synthetic Sequence
acgccgggtt

SEQ ID NO: 971 - DNA, 10 bp, Artificial Sequence
  Synthetic Sequence
cgacaataac

SEQ ID NO: 972 - DNA, 10 bp, Artificial Sequence
  Synthetic Sequence
gcagcagatg

SEQ ID NO: 973 - DNA, 10 bp, Artificial Sequence
  Synthetic Sequence
attacggcac

SEQ ID NO: 974 - DNA, 10 bp, Artificial Sequence
  Synthetic Sequence
actctctcca

SEQ ID NO: 975 - DNA, 10 bp, Artificial Sequence
  Synthetic Sequence
accatccctc

SEQ ID NO: 976 - DNA, 10 bp, Artificial Sequence
  Synthetic Sequence
aggatgatga

SEQ ID NO: 977 - DNA, 10 bp, Artificial Sequence
  Synthetic Sequence
cgagaacatc

SEQ ID NO: 978 - DNA, 10 bp, Artificial Sequence
  Synthetic Sequence
gaggagtcca

SEQ ID NO: 979 - DNA, 10 bp, Artificial Sequence
  Synthetic Sequence
ttgaaacttc

SEQ ID NO: 980 - DNA, 10 bp, Artificial Sequence
  Synthetic Sequence
tgtcaatctt

SEQ ID NO: 981 - DNA, 10 bp, Artificial Sequence
  Synthetic Sequence
cagcttatct

SEQ ID NO: 982 - DNA, 10 bp, Artificial Sequence
  Synthetic Sequence
ttgtattcct

SEQ ID NO: 983 - DNA, 10 bp, Artificial Sequence
  Synthetic Sequence
gcatgacggg

SEQ ID NO: 984 - DNA, 10 bp, Artificial Sequence
  Synthetic Sequence
tctaggagtc

SEQ ID NO: 985 - DNA, 10 bp, Artificial Sequence
  Synthetic Sequence
actgcccgag

SEQ ID NO: 986 - DNA, 10 bp, Artificial Sequence
  Synthetic Sequence
aatagtcaat

SEQ ID NO: 987 - DNA, 10 bp, Artificial Sequence
  Synthetic Sequence
cgggacaggt

SEQ ID NO: 988 - DNA, 10 bp, Artificial Sequence
  Synthetic Sequence
cacagcgttc

SEQ ID NO: 989 - DNA, 10 bp, Artificial Sequence
  Synthetic Sequence
tccctcaaag

SEQ ID NO: 990 - DNA, 10 bp, Artificial Sequence
  Synthetic Sequence
gctttccctg

SEQ ID NO: 991 - DNA, 10 bp, Artificial Sequence
  Synthetic Sequence
gccacaaatt

SEQ ID NO: 992 - DNA, 10 bp, Artificial Sequence
  Synthetic Sequence
gcggcttcgt

SEQ ID NO: 993 - DNA, 10 bp, Artificial Sequence
  Synthetic Sequence
gaagccagga

SEQ ID NO: 994 - DNA, 10 bp, Artificial Sequence
  Synthetic Sequence
tggaacgtgc

SEQ ID NO: 995 - DNA, 10 bp, Artificial Sequence
  Synthetic Sequence
atctgtcccg

SEQ ID NO: 996 - DNA, 10 bp, Artificial Sequence
  Synthetic Sequence
ccttctcgac

SEQ ID NO: 997 - DNA, 10 bp, Artificial Sequence
  Synthetic Sequence
ccgtatggtg

SEQ ID NO: 998 - DNA, 10 bp, Artificial Sequence
  Synthetic Sequence
cttgggttac

SEQ ID NO: 999 - DNA, 10 bp, Artificial Sequence
  Synthetic Sequence
cctgtacgga

SEQ ID NO: 1000 - DNA, 10 bp, Artificial Sequence
  Synthetic Sequence
tgcgacggtc

SEQ ID NO: 1001 - DNA, 10 bp, Artificial Sequence
  Synthetic Sequence
agacatgcga

SEQ ID NO: 1002 - DNA, 10 bp, Artificial Sequence
  Synthetic Sequence
tgcgcctcta

SEQ ID NO: 1003 - DNA, 10 bp, Artificial Sequence
  Synthetic Sequence
ttcaacgccg

SEQ ID NO: 1004 - DNA, 10 bp, Artificial Sequence
  Synthetic Sequence
atgctatact

SEQ ID NO: 1005 - DNA, 10 bp, Artificial Sequence
  Synthetic Sequence
aatagcctac

SEQ ID NO: 1006 - DNA, 10 bp, Artificial Sequence
  Synthetic Sequence
tgtcctgacc

SEQ ID NO: 1007 - DNA, 10 bp, Artificial Sequence
  Synthetic Sequence
tcttggcctg

SEQ ID NO: 1008 - DNA, 10 bp, Artificial Sequence
  Synthetic Sequence
agaccgtggt

SEQ ID NO: 1009 - DNA, 10 bp, Artificial Sequence
  Synthetic Sequence
agtagtcacg

SEQ ID NO: 1010 - DNA, 10 bp, Artificial Sequence
  Synthetic Sequence
gacggtagtg

SEQ ID NO: 1011 - DNA, 10 bp, Artificial Sequence
  Synthetic Sequence
cgtctgccta

SEQ ID NO: 1012 - DNA, 10 bp, Artificial Sequence
  Synthetic Sequence
tggattcggt

SEQ ID NO: 1013 - DNA, 10 bp, Artificial Sequence
  Synthetic Sequence
ctttcgtgtt

SEQ ID NO: 1014 - DNA, 10 bp, Artificial Sequence
  Synthetic Sequence
cgtaccgaaa

SEQ ID NO: 1015 - DNA, 10 bp, Artificial Sequence
  Synthetic Sequence
gtagctaacg

SEQ ID NO: 1016 - DNA, 10 bp, Artificial Sequence
  Synthetic Sequence
gtatagtgtg

SEQ ID NO: 1017 - DNA, 10 bp, Artificial Sequence
  Synthetic Sequence
tgtggtttca

SEQ ID NO: 1018 - DNA, 10 bp, Artificial Sequence
  Synthetic Sequence
tacttcgagg

SEQ ID NO: 1019 - DNA, 10 bp, Artificial Sequence
  Synthetic Sequence
ttgagcgagc

SEQ ID NO: 1020 - DNA, 10 bp, Artificial Sequence
  Synthetic Sequence
cccatatctc

SEQ ID NO: 1021 - DNA, 10 bp, Artificial Sequence
  Synthetic Sequence
aatcgcggcc

SEQ ID NO: 1022 - DNA, 10 bp, Artificial Sequence
  Synthetic Sequence
acgaaggagc

SEQ ID NO: 1023 - DNA, 10 bp, Artificial Sequence
  Synthetic Sequence
tgggaccgtg

SEQ ID NO: 1024 - DNA, 10 bp, Artificial Sequence
  Synthetic Sequence
cacgtttcgc

SEQ ID NO: 1025 - DNA, 10 bp, Artificial Sequence
  Synthetic Sequence
tatcgagagt

SEQ ID NO: 1026 - DNA, 10 bp, Artificial Sequence
  Synthetic Sequence
agtcgagcaa

SEQ ID NO: 1027 - DNA, 10 bp, Artificial Sequence
  Synthetic Sequence
tctcaaagta

SEQ ID NO: 1028 - DNA, 10 bp, Artificial Sequence
  Synthetic Sequence
aagtaaggga

SEQ ID NO: 1029 - DNA, 10 bp, Artificial Sequence
  Synthetic Sequence
cgttaggcct

SEQ ID NO: 1030 - DNA, 10 bp, Artificial Sequence
  Synthetic Sequence
tacaaccgag

SEQ ID NO: 1031 - DNA, 10 bp, Artificial Sequence
  Synthetic Sequence
gtgtcctaga

SEQ ID NO: 1032 - DNA, 10 bp, Artificial Sequence
  Synthetic Sequence
gagggaatat

SEQ ID NO: 1033 - DNA, 10 bp, Artificial Sequence
  Synthetic Sequence
tattctatgg

SEQ ID NO: 1034 - DNA, 10 bp, Artificial Sequence
  Synthetic Sequence
acggaagtaa

SEQ ID NO: 1035 - DNA, 10 bp, Artificial Sequence
  Synthetic Sequence
gagggcgcaa

SEQ ID NO: 1036 - DNA, 10 bp, Artificial Sequence
  Synthetic Sequence
gaaacttctg

SEQ ID NO: 1037 - DNA, 10 bp, Artificial Sequence
  Synthetic Sequence
caattagctt

SEQ ID NO: 1038 - DNA, 10 bp, Artificial Sequence
  Synthetic Sequence
cagggtcata

SEQ ID NO: 1039 - DNA, 10 bp, Artificial Sequence
  Synthetic Sequence
gctgagacca

SEQ ID NO: 1040 - DNA, 10 bp, Artificial Sequence
  Synthetic Sequence
taaccggttc

SEQ ID NO: 1041 - DNA, 10 bp, Artificial Sequence
  Synthetic Sequence
tcctactatc

SEQ ID NO: 1042 - DNA, 10 bp, Artificial Sequence
  Synthetic Sequence
cgcacaccag

SEQ ID NO: 1043 - DNA, 10 bp, Artificial Sequence
  Synthetic Sequence
cttgaaggtc

SEQ ID NO: 1044 - DNA, 10 bp, Artificial Sequence
  Synthetic Sequence
aacgtcagga

SEQ ID NO: 1045 - DNA, 10 bp, Artificial Sequence
  Synthetic Sequence
cgtgaatatg

SEQ ID NO: 1046 - DNA, 10 bp, Artificial Sequence
  Synthetic Sequence
gtgtatttag

SEQ ID NO: 1047 - DNA, 10 bp, Artificial Sequence
  Synthetic Sequence
tgctaacaaa

SEQ ID NO: 1048 - DNA, 10 bp, Artificial Sequence
  Synthetic Sequence
atttggctgt

SEQ ID NO: 1049 - DNA, 10 bp, Artificial Sequence
  Synthetic Sequence
ccagtacaaa

SEQ ID NO: 1050 - DNA, 10 bp, Artificial Sequence
  Synthetic Sequence
cgaagtgaac

SEQ ID NO: 1051 - DNA, 10 bp, Artificial Sequence
  Synthetic Sequence
ctccgcttcg

SEQ ID NO: 1052 - DNA, 10 bp, Artificial Sequence
  Synthetic Sequence
accgtttcct

SEQ ID NO: 1053 - DNA, 10 bp, Artificial Sequence
  Synthetic Sequence
gatgtcatac

SEQ ID NO: 1054 - DNA, 10 bp, Artificial Sequence
  Synthetic Sequence
tcgctctcgg

SEQ ID NO: 1055 - DNA, 10 bp, Artificial Sequence
  Synthetic Sequence
cgcttgtacg

SEQ ID NO: 1056 - DNA, 10 bp, Artificial Sequence
  Synthetic Sequence
gaacagatgc

SEQ ID NO: 1057 - DNA, 10 bp, Artificial Sequence
  Synthetic Sequence
ctttacgctt

SEQ ID NO: 1058 - DNA, 10 bp, Artificial Sequence
  Synthetic Sequence
atatccaggt

SEQ ID NO: 1059 - DNA, 10 bp, Artificial Sequence
  Synthetic Sequence
tcagcatagt

SEQ ID NO: 1060 - DNA, 10 bp, Artificial Sequence
  Synthetic Sequence
cgtatgtatt

SEQ ID NO: 1061 - DNA, 10 bp, Artificial Sequence
  Synthetic Sequence
gggcttagcg

SEQ ID NO: 1062 - DNA, 10 bp, Artificial Sequence
  Synthetic Sequence
aatgaattta

SEQ ID NO: 1063 - DNA, 10 bp, Artificial Sequence
  Synthetic Sequence
gttaatgccc

SEQ ID NO: 1064 - DNA, 10 bp, Artificial Sequence
  Synthetic Sequence
agttatgccg

SEQ ID NO: 1065 - DNA, 10 bp, Artificial Sequence
  Synthetic Sequence
atctttcggg

SEQ ID NO: 1066 - DNA, 10 bp, Artificial Sequence
  Synthetic Sequence
attgcttgtt

SEQ ID NO: 1067 - DNA, 10 bp, Artificial Sequence
  Synthetic Sequence
gtacttacct

SEQ ID NO: 1068 - DNA, 10 bp, Artificial Sequence
  Synthetic Sequence
gtgtaagtgg

SEQ ID NO: 1069 - DNA, 10 bp, Artificial Sequence
  Synthetic Sequence
tcattataaa

SEQ ID NO: 1070 - DNA, 10 bp, Artificial Sequence
  Synthetic Sequence
gaacactagg

SEQ ID NO: 1071 - DNA, 10 bp, Artificial Sequence
  Synthetic Sequence
taggattgaa

SEQ ID NO: 1072 - DNA, 10 bp, Artificial Sequence
  Synthetic Sequence
gaacgtgaat

SEQ ID NO: 1073 - DNA, 10 bp, Artificial Sequence
  Synthetic Sequence
cgtggtcaag

SEQ ID NO: 1074 - DNA, 10 bp, Artificial Sequence
  Synthetic Sequence
tcccagggca

SEQ ID NO: 1075 - DNA, 10 bp, Artificial Sequence
  Synthetic Sequence
cctaacaacc

SEQ ID NO: 1076 - DNA, 10 bp, Artificial Sequence
  Synthetic Sequence
agtggctcta

SEQ ID NO: 1077 - DNA, 10 bp, Artificial Sequence
  Synthetic Sequence
ggatgaggag

SEQ ID NO: 1078 - DNA, 10 bp, Artificial Sequence
  Synthetic Sequence
gtaatcgcct

SEQ ID NO: 1079 - DNA, 10 bp, Artificial Sequence
  Synthetic Sequence
tccagcgaaa

SEQ ID NO: 1080 - DNA, 10 bp, Artificial Sequence
  Synthetic Sequence
caactacgaa

SEQ ID NO: 1081 - DNA, 10 bp, Artificial Sequence
  Synthetic Sequence
aatctatgaa

SEQ ID NO: 1082 - DNA, 10 bp, Artificial Sequence
  Synthetic Sequence
tgacgaccgt

SEQ ID NO: 1083 - DNA, 10 bp, Artificial Sequence
  Synthetic Sequence
catgctcatt

SEQ ID NO: 1084 - DNA, 10 bp, Artificial Sequence
  Synthetic Sequence
gtagatgtag

SEQ ID NO: 1085 - DNA, 10 bp, Artificial Sequence
  Synthetic Sequence
ttaggcccat

SEQ ID NO: 1086 - DNA, 10 bp, Artificial Sequence
  Synthetic Sequence
tcttaaggct

SEQ ID NO: 1087 - DNA, 10 bp, Artificial Sequence
  Synthetic Sequence
attcatactg

SEQ ID NO: 1088 - DNA, 10 bp, Artificial Sequence
  Synthetic Sequence
gatatgagcc

SEQ ID NO: 1089 - DNA, 10 bp, Artificial Sequence
  Synthetic Sequence
gaaccaggag

SEQ ID NO: 1090 - DNA, 10 bp, Artificial Sequence
  Synthetic Sequence
gttgcatatg

SEQ ID NO: 1091 - DNA, 10 bp, Artificial Sequence
  Synthetic Sequence
gagtcttcca

SEQ ID NO: 1092 - DNA, 10 bp, Artificial Sequence
  Synthetic Sequence
aagaatggca

SEQ ID NO: 1093 - DNA, 10 bp, Artificial Sequence
  Synthetic Sequence
ttcgggagaa

SEQ ID NO: 1094 - DNA, 10 bp, Artificial Sequence
  Synthetic Sequence
ccgtaactgt

SEQ ID NO: 1095 - DNA, 10 bp, Artificial Sequence
  Synthetic Sequence
tacttagtcg

SEQ ID NO: 1096 - DNA, 10 bp, Artificial Sequence
  Synthetic Sequence
gagcctatga

SEQ ID NO: 1097 - DNA, 10 bp, Artificial Sequence
  Synthetic Sequence
ctgactatat

SEQ ID NO: 1098 - DNA, 10 bp, Artificial Sequence
  Synthetic Sequence
aatctaagcg

SEQ ID NO: 1099 - DNA, 10 bp, Artificial Sequence
  Synthetic Sequence
atcttcaaga

SEQ ID NO: 1100 - DNA, 10 bp, Artificial Sequence
  Synthetic Sequence
ctaagccctt

SEQ ID NO: 1101 - DNA, 10 bp, Artificial Sequence
  Synthetic Sequence
acgctttcac

SEQ ID NO: 1102 - DNA, 10 bp, Artificial Sequence
  Synthetic Sequence
cacggctacg

SEQ ID NO: 1103 - DNA, 10 bp, Artificial Sequence
  Synthetic Sequence
cgggatttga

SEQ ID NO: 1104 - DNA, 10 bp, Artificial Sequence
  Synthetic Sequence
tgaagacgct

SEQ ID NO: 1105 - DNA, 10 bp, Artificial Sequence
  Synthetic Sequence
ttcaacaact

SEQ ID NO: 1106 - DNA, 10 bp, Artificial Sequence
  Synthetic Sequence
cgccagtgga

SEQ ID NO: 1107 - DNA, 10 bp, Artificial Sequence
  Synthetic Sequence
ccctgaactt

SEQ ID NO: 1108 - DNA, 10 bp, Artificial Sequence
  Synthetic Sequence
cgattcgcgc

SEQ ID NO: 1109 - DNA, 10 bp, Artificial Sequence
  Synthetic Sequence
attgcaatat

SEQ ID NO: 1110 - DNA, 10 bp, Artificial Sequence
  Synthetic Sequence
gggcgagaac

SEQ ID NO: 1111 - DNA, 10 bp, Artificial Sequence
  Synthetic Sequence
tggcgttgcg

SEQ ID NO: 1112 - DNA, 10 bp, Artificial Sequence
  Synthetic Sequence
tggtatacga

SEQ ID NO: 1113 - DNA, 10 bp, Artificial Sequence
  Synthetic Sequence
gggtcgatgc

SEQ ID NO: 1114 - DNA, 10 bp, Artificial Sequence
  Synthetic Sequence
gtaaggaaca

SEQ ID NO: 1115 - DNA, 10 bp, Artificial Sequence
  Synthetic Sequence
gtacgtataa

SEQ ID NO: 1116 - DNA, 10 bp, Artificial Sequence
  Synthetic Sequence
gaatttgtac

SEQ ID NO: 1117 - DNA, 10 bp, Artificial Sequence
  Synthetic Sequence
gccagtcgtt

SEQ ID NO: 1118 - DNA, 10 bp, Artificial Sequence
  Synthetic Sequence
ctgtatggct

SEQ ID NO: 1119 - DNA, 10 bp, Artificial Sequence
  Synthetic Sequence
catctgctgc

SEQ ID NO: 1120 - DNA, 10 bp, Artificial Sequence
  Synthetic Sequence
ccgttggctc

SEQ ID NO: 1121 - DNA, 10 bp, Artificial Sequence
  Synthetic Sequence
accgtcaccc

SEQ ID NO: 1122 - DNA, 10 bp, Artificial Sequence
  Synthetic Sequence
acagaatctt

SEQ ID NO: 1123 - DNA, 10 bp, Artificial Sequence
  Synthetic Sequence
tgcggcagct

SEQ ID NO: 1124 - DNA, 10 bp, Artificial Sequence
  Synthetic Sequence
gcctctggtt

SEQ ID NO: 1125 - DNA, 10 bp, Artificial Sequence
  Synthetic Sequence
gactagtcat

SEQ ID NO: 1126 - DNA, 10 bp, Artificial Sequence
  Synthetic Sequence
cgagaccgtt

SEQ ID NO: 1127 - DNA, 10 bp, Artificial Sequence
  Synthetic Sequence
acacccgcct

SEQ ID NO: 1128 - DNA, 10 bp, Artificial Sequence
  Synthetic Sequence
tgatcgcttg

SEQ ID NO: 1129 - DNA, 10 bp, Artificial Sequence
  Synthetic Sequence
cttatcaccg

SEQ ID NO: 1130 - DNA, 10 bp, Artificial Sequence
  Synthetic Sequence
cacagaggag

SEQ ID NO: 1131 - DNA, 10 bp, Artificial Sequence
  Synthetic Sequence
ctccttcatt

SEQ ID NO: 1132 - DNA, 10 bp, Artificial Sequence
  Synthetic Sequence
tcgtcaaagg

SEQ ID NO: 1133 - DNA, 10 bp, Artificial Sequence
  Synthetic Sequence
tgtttgacgt

SEQ ID NO: 1134 - DNA, 10 bp, Artificial Sequence
  Synthetic Sequence
ttcgcgttaa

SEQ ID NO: 1135 - DNA, 10 bp, Artificial Sequence
  Synthetic Sequence
agtggccgtg

SEQ ID NO: 1136 - DNA, 10 bp, Artificial Sequence
  Synthetic Sequence
tacaacttgc

SEQ ID NO: 1137 - DNA, 10 bp, Artificial Sequence
  Synthetic Sequence
gataaggccg

SEQ ID NO: 1138 - DNA, 10 bp, Artificial Sequence
  Synthetic Sequence
gtttgataga

SEQ ID NO: 1139 - DNA, 10 bp, Artificial Sequence
  Synthetic Sequence
ggtgacagcc

SEQ ID NO: 1140 - DNA, 10 bp, Artificial Sequence
  Synthetic Sequence
gggtgtccct

SEQ ID NO: 1141 - DNA, 10 bp, Artificial Sequence
  Synthetic Sequence
ttccactagg

SEQ ID NO: 1142 - DNA, 10 bp, Artificial Sequence
  Synthetic Sequence
agtaaactat

SEQ ID NO: 1143 - DNA, 10 bp, Artificial Sequence
  Synthetic Sequence
atggtttcga

SEQ ID NO: 1144 - DNA, 10 bp, Artificial Sequence
  Synthetic Sequence
gagaccaata

SEQ ID NO: 1145 - DNA, 10 bp, Artificial Sequence
  Synthetic Sequence
gatctcacca

SEQ ID NO: 1146 - DNA, 10 bp, Artificial Sequence
  Synthetic Sequence
acgtatcaag

SEQ ID NO: 1147 - DNA, 10 bp, Artificial Sequence
  Synthetic Sequence
gtaggccaag

SEQ ID NO: 1148 - DNA, 10 bp, Artificial Sequence
  Synthetic Sequence
gcgtaagcta

SEQ ID NO: 1149 - DNA, 10 bp, Artificial Sequence
  Synthetic Sequence
taacgccacg

SEQ ID NO: 1150 - DNA, 10 bp, Artificial Sequence
  Synthetic Sequence
gcaggactct

SEQ ID NO: 1151 - DNA, 10 bp, Artificial Sequence
  Synthetic Sequence
gtcgtttgtc

SEQ ID NO: 1152 - DNA, 10 bp, Artificial Sequence
  Synthetic Sequence
caatgatatc

SEQ ID NO: 1153 - DNA, 10 bp, Artificial Sequence
  Synthetic Sequence
tcttcatcga

SEQ ID NO: 1154 - DNA, 10 bp, Artificial Sequence
  Synthetic Sequence
tgaccaggca

SEQ ID NO: 1155 - DNA, 10 bp, Artificial Sequence
  Synthetic Sequence
ctgggttcac

SEQ ID NO: 1156 - DNA, 10 bp, Artificial Sequence
  Synthetic Sequence
ggcttataac

SEQ ID NO: 1157 - DNA, 10 bp, Artificial Sequence
  Synthetic Sequence
caatataccc

SEQ ID NO: 1158 - DNA, 10 bp, Artificial Sequence
  Synthetic Sequence
ggtaagtact

SEQ ID NO: 1159 - DNA, 10 bp, Artificial Sequence
  Synthetic Sequence
cctttcttcc

SEQ ID NO: 1160 - DNA, 10 bp, Artificial Sequence
  Synthetic Sequence
atggagatac

SEQ ID NO: 1161 - DNA, 10 bp, Artificial Sequence
  Synthetic Sequence
ttctcagact

SEQ ID NO: 1162 - DNA, 10 bp, Artificial Sequence
  Synthetic Sequence
ttgaccctcg

SEQ ID NO: 1163 - DNA, 10 bp, Artificial Sequence
  Synthetic Sequence
cagcggactt

SEQ ID NO: 1164 - DNA, 10 bp, Artificial Sequence
  Synthetic Sequence
ttctaacagc

SEQ ID NO: 1165 - DNA, 10 bp, Artificial Sequence
  Synthetic Sequence
cccatccgat

SEQ ID NO: 1166 - DNA, 10 bp, Artificial Sequence
  Synthetic Sequence
agttgcgtca

SEQ ID NO: 1167 - DNA, 10 bp, Artificial Sequence
  Synthetic Sequence
acacgctaag

SEQ ID NO: 1168 - DNA, 10 bp, Artificial Sequence
  Synthetic Sequence
cgaagagtta

SEQ ID NO: 1169 - DNA, 10 bp, Artificial Sequence
  Synthetic Sequence
gactcgttcc

SEQ ID NO: 1170 - DNA, 10 bp, Artificial Sequence
  Synthetic Sequence
ctgaccgtgc

SEQ ID NO: 1171 - DNA, 10 bp, Artificial Sequence
  Synthetic Sequence
gctaaagtgg

SEQ ID NO: 1172 - DNA, 10 bp, Artificial Sequence
  Synthetic Sequence
tgggtttagg

SEQ ID NO: 1173 - DNA, 10 bp, Artificial Sequence
  Synthetic Sequence
tctatgccat

SEQ ID NO: 1174 - DNA, 10 bp, Artificial Sequence
  Synthetic Sequence
ttggtccaac

SEQ ID NO: 1175 - DNA, 10 bp, Artificial Sequence
  Synthetic Sequence
acgactctac

SEQ ID NO: 1176 - DNA, 10 bp, Artificial Sequence
  Synthetic Sequence
gatgaggtta

SEQ ID NO: 1177 - DNA, 10 bp, Artificial Sequence
  Synthetic Sequence
atctggccat

SEQ ID NO: 1178 - DNA, 10 bp, Artificial Sequence
  Synthetic Sequence
catttgtccc

SEQ ID NO: 1179 - DNA, 10 bp, Artificial Sequence
  Synthetic Sequence
ggatagaggg

SEQ ID NO: 1180 - DNA, 10 bp, Artificial Sequence
  Synthetic Sequence
accttatacg

SEQ ID NO: 1181 - DNA, 10 bp, Artificial Sequence
  Synthetic Sequence
acacagcgac

SEQ ID NO: 1182 - DNA, 10 bp, Artificial Sequence
  Synthetic Sequence
tggagcatat

SEQ ID NO: 1183 - DNA, 10 bp, Artificial Sequence
  Synthetic Sequence
attcctctaa

SEQ ID NO: 1184 - DNA, 10 bp, Artificial Sequence
  Synthetic Sequence
atgatatgag

SEQ ID NO: 1185 - DNA, 10 bp, Artificial Sequence
  Synthetic Sequence
atttaccagc

SEQ ID NO: 1186 - DNA, 10 bp, Artificial Sequence
  Synthetic Sequence
gtactctaga

SEQ ID NO: 1187 - DNA, 10 bp, Artificial Sequence
  Synthetic Sequence
gatactgata

SEQ ID NO: 1188 - DNA, 10 bp, Artificial Sequence
  Synthetic Sequence
accacctcct

SEQ ID NO: 1189 - DNA, 10 bp, Artificial Sequence
  Synthetic Sequence
acagcatcgg

SEQ ID NO: 1190 - DNA, 10 bp, Artificial Sequence
  Synthetic Sequence
gtataatata

SEQ ID NO: 1191 - DNA, 10 bp, Artificial Sequence
  Synthetic Sequence
gtatacacat

SEQ ID NO: 1192 - DNA, 10 bp, Artificial Sequence
  Synthetic Sequence
ggactaactt

SEQ ID NO: 1193 - DNA, 10 bp, Artificial Sequence
  Synthetic Sequence
acgaaatgta

SEQ ID NO: 1194 - DNA, 10 bp, Artificial Sequence
  Synthetic Sequence
gcactggacg

SEQ ID NO: 1195 - DNA, 10 bp, Artificial Sequence
  Synthetic Sequence
ccgaagactt

SEQ ID NO: 1196 - DNA, 10 bp, Artificial Sequence
  Synthetic Sequence
aaagctctac

SEQ ID NO: 1197 - DNA, 10 bp, Artificial Sequence
  Synthetic Sequence
cctggaccag

SEQ ID NO: 1198 - DNA, 10 bp, Artificial Sequence
  Synthetic Sequence
atcactaaga

SEQ ID NO: 1199 - DNA, 10 bp, Artificial Sequence
  Synthetic Sequence
ttcgcgatgc

SEQ ID NO: 1200 - DNA, 10 bp, Artificial Sequence
  Synthetic Sequence
gaatccatgg

SEQ ID NO: 1201 - DNA, 10 bp, Artificial Sequence
  Synthetic Sequence
aatccagcat

SEQ ID NO: 1202 - DNA, 10 bp, Artificial Sequence
  Synthetic Sequence
gccgaagata

SEQ ID NO: 1203 - DNA, 10 bp, Artificial Sequence
  Synthetic Sequence
tccgcgaagg

SEQ ID NO: 1204 - DNA, 10 bp, Artificial Sequence
  Synthetic Sequence
cttgattaaa

SEQ ID NO: 1205 - DNA, 10 bp, Artificial Sequence
  Synthetic Sequence
agctccagta

SEQ ID NO: 1206 - DNA, 10 bp, Artificial Sequence
  Synthetic Sequence
agtaacgact

SEQ ID NO: 1207 - DNA, 10 bp, Artificial Sequence
  Synthetic Sequence
gccttgaccg

SEQ ID NO: 1208 - DNA, 10 bp, Artificial Sequence
  Synthetic Sequence
gtcagcgacc

SEQ ID NO: 1209 - DNA, 10 bp, Artificial Sequence
  Synthetic Sequence
tgtggtgcaa

SEQ ID NO: 1210 - DNA, 10 bp, Artificial Sequence
  Synthetic Sequence
tctcgttcct

SEQ ID NO: 1211 - DNA, 10 bp, Artificial Sequence
  Synthetic Sequence
gctcgatccc

SEQ ID NO: 1212 - DNA, 10 bp, Artificial Sequence
  Synthetic Sequence
taagcggtgg

SEQ ID NO: 1213 - DNA, 10 bp, Artificial Sequence
  Synthetic Sequence
cctcaacggt

SEQ ID NO: 1214 - DNA, 10 bp, Artificial Sequence
  Synthetic Sequence
ttaacttcgt

SEQ ID NO: 1215 - DNA, 10 bp, Artificial Sequence
  Synthetic Sequence
tccaacgggt

SEQ ID NO: 1216 - DNA, 10 bp, Artificial Sequence
  Synthetic Sequence
aggtggcgtt

SEQ ID NO: 1217 - DNA, 10 bp, Artificial Sequence
  Synthetic Sequence
tttataggga

SEQ ID NO: 1218 - DNA, 10 bp, Artificial Sequence
  Synthetic Sequence
tgacaattaa

SEQ ID NO: 1219 - DNA, 10 bp, Artificial Sequence
  Synthetic Sequence
atacgcttac

SEQ ID NO: 1220 - DNA, 10 bp, Artificial Sequence
  Synthetic Sequence
tgtccctgac

SEQ ID NO: 1221 - DNA, 10 bp, Artificial Sequence
  Synthetic Sequence
ttaaatgagc

SEQ ID NO: 1222 - DNA, 10 bp, Artificial Sequence
  Synthetic Sequence
ggaatccaac

SEQ ID NO: 1223 - DNA, 10 bp, Artificial Sequence
  Synthetic Sequence
gaggtatttg

SEQ ID NO: 1224 - DNA, 10 bp, Artificial Sequence
  Synthetic Sequence
cagaccatct

SEQ ID NO: 1225 - DNA, 10 bp, Artificial Sequence
  Synthetic Sequence
catcttgcgg

SEQ ID NO: 1226 - DNA, 10 bp, Artificial Sequence
  Synthetic Sequence
gaaatccgaa

SEQ ID NO: 1227 - DNA, 10 bp, Artificial Sequence
  Synthetic Sequence
catcaacctt

SEQ ID NO: 1228 - DNA, 10 bp, Artificial Sequence
  Synthetic Sequence
gggtagtatg

SEQ ID NO: 1229 - DNA, 10 bp, Artificial Sequence
  Synthetic Sequence
ccggcaaatc

SEQ ID NO: 1230 - DNA, 10 bp, Artificial Sequence
  Synthetic Sequence
cgagccgaca

SEQ ID NO: 1231 - DNA, 10 bp, Artificial Sequence
  Synthetic Sequence
gcatcttaca

SEQ ID NO: 1232 - DNA, 10 bp, Artificial Sequence
  Synthetic Sequence
cggattaaga

SEQ ID NO: 1233 - DNA, 10 bp, Artificial Sequence
  Synthetic Sequence
attcggtact

SEQ ID NO: 1234 - DNA, 10 bp, Artificial Sequence
  Synthetic Sequence
tcagttcatg

SEQ ID NO: 1235 - DNA, 10 bp, Artificial Sequence
  Synthetic Sequence
gagtctccat

SEQ ID NO: 1236 - DNA, 10 bp, Artificial Sequence
  Synthetic Sequence
cggaccggta

SEQ ID NO: 1237 - DNA, 10 bp, Artificial Sequence
  Synthetic Sequence
tacacatctc

SEQ ID NO: 1238 - DNA, 10 bp, Artificial Sequence
  Synthetic Sequence
ctggattacc

SEQ ID NO: 1239 - DNA, 10 bp, Artificial Sequence
  Synthetic Sequence
tgacgtactt

SEQ ID NO: 1240 - DNA, 10 bp, Artificial Sequence
  Synthetic Sequence
ccctagagga

SEQ ID NO: 1241 - DNA, 10 bp, Artificial Sequence
  Synthetic Sequence
aatctttcga

SEQ ID NO: 1242 - DNA, 10 bp, Artificial Sequence
  Synthetic Sequence
cattcttgct

SEQ ID NO: 1243 - DNA, 10 bp, Artificial Sequence
  Synthetic Sequence
acaatactta

SEQ ID NO: 1244 - DNA, 10 bp, Artificial Sequence
  Synthetic Sequence
gagatcagct

SEQ ID NO: 1245 - DNA, 10 bp, Artificial Sequence
  Synthetic Sequence
ccaatctacc

SEQ ID NO: 1246 - DNA, 10 bp, Artificial Sequence
  Synthetic Sequence
ataactcctg

SEQ ID NO: 1247 - DNA, 10 bp, Artificial Sequence
  Synthetic Sequence
ctgacgcaga

SEQ ID NO: 1248 - DNA, 10 bp, Artificial Sequence
  Synthetic Sequence
cccaaaggtt

SEQ ID NO: 1249 - DNA, 10 bp, Artificial Sequence
  Synthetic Sequence
cactgattaa

SEQ ID NO: 1250 - DNA, 10 bp, Artificial Sequence
  Synthetic Sequence
aggaccaaac

SEQ ID NO: 1251 - DNA, 10 bp, Artificial Sequence
  Synthetic Sequence
ccctcaggta

SEQ ID NO: 1252 - DNA, 10 bp, Artificial Sequence
  Synthetic Sequence
aggcttgtca

SEQ ID NO: 1253 - DNA, 10 bp, Artificial Sequence
  Synthetic Sequence
tcgtagtact

SEQ ID NO: 1254 - DNA, 10 bp, Artificial Sequence
  Synthetic Sequence
aatacgcact

SEQ ID NO: 1255 - DNA, 10 bp, Artificial Sequence
  Synthetic Sequence
ccaacgaatt

SEQ ID NO: 1256 - DNA, 10 bp, Artificial Sequence
  Synthetic Sequence
tcgcggacag

SEQ ID NO: 1257 - DNA, 10 bp, Artificial Sequence
  Synthetic Sequence
gagcgtggga

SEQ ID NO: 1258 - DNA, 10 bp, Artificial Sequence
  Synthetic Sequence
agtgggaggg

SEQ ID NO: 1259 - DNA, 10 bp, Artificial Sequence
  Synthetic Sequence
cgaatactct

SEQ ID NO: 1260 - DNA, 10 bp, Artificial Sequence
  Synthetic Sequence
tggcgcgaca

SEQ ID NO: 1261 - DNA, 10 bp, Artificial Sequence
  Synthetic Sequence
ggtatcccgc

SEQ ID NO: 1262 - DNA, 10 bp, Artificial Sequence
  Synthetic Sequence
tttcttatta

SEQ ID NO: 1263 - DNA, 10 bp, Artificial Sequence
  Synthetic Sequence
gagctaagta

SEQ ID NO: 1264 - DNA, 10 bp, Artificial Sequence
  Synthetic Sequence
gtggtaatgc

SEQ ID NO: 1265 - DNA, 10 bp, Artificial Sequence
  Synthetic Sequence
tacgtgattg

SEQ ID NO: 1266 - DNA, 10 bp, Artificial Sequence
  Synthetic Sequence
cgcatgatcc

SEQ ID NO: 1267 - DNA, 10 bp, Artificial Sequence
  Synthetic Sequence
gagaaacgtt

SEQ ID NO: 1268 - DNA, 10 bp, Artificial Sequence
  Synthetic Sequence
acgaccgacc

SEQ ID NO: 1269 - DNA, 10 bp, Artificial Sequence
  Synthetic Sequence
tacgtacaat

SEQ ID NO: 1270 - DNA, 10 bp, Artificial Sequence
  Synthetic Sequence
actcgaccga

SEQ ID NO: 1271 - DNA, 10 bp, Artificial Sequence
  Synthetic Sequence
gcttcaggcg

SEQ ID NO: 1272 - DNA, 10 bp, Artificial Sequence
  Synthetic Sequence
gtacaaggct

SEQ ID NO: 1273 - DNA, 10 bp, Artificial Sequence
  Synthetic Sequence
ttgtcaaata

SEQ ID NO: 1274 - DNA, 10 bp, Artificial Sequence
  Synthetic Sequence
agatttgtgc

SEQ ID NO: 1275 - DNA, 10 bp, Artificial Sequence
  Synthetic Sequence
cgtagactag

SEQ ID NO: 1276 - DNA, 10 bp, Artificial Sequence
  Synthetic Sequence
tacataaatg

SEQ ID NO: 1277 - DNA, 10 bp, Artificial Sequence
  Synthetic Sequence
agttggaacg

SEQ ID NO: 1278 - DNA, 10 bp, Artificial Sequence
  Synthetic Sequence
atcttgatct

SEQ ID NO: 1279 - DNA, 10 bp, Artificial Sequence
  Synthetic Sequence
caggatctcg

SEQ ID NO: 1280 - DNA, 10 bp, Artificial Sequence
  Synthetic Sequence
gaagcagagc

SEQ ID NO: 1281 - DNA, 10 bp, Artificial Sequence
  Synthetic Sequence
cggtggattc

SEQ ID NO: 1282 - DNA, 10 bp, Artificial Sequence
  Synthetic Sequence
tttatgctag

SEQ ID NO: 1283 - DNA, 10 bp, Artificial Sequence
  Synthetic Sequence
gtcatattag

SEQ ID NO: 1284 - DNA, 10 bp, Artificial Sequence
  Synthetic Sequence
gtttcgccta

SEQ ID NO: 1285 - DNA, 10 bp, Artificial Sequence
  Synthetic Sequence
cccactgaac

SEQ ID NO: 1286 - DNA, 10 bp, Artificial Sequence
  Synthetic Sequence
ttggttaatg

SEQ ID NO: 1287 - DNA, 10 bp, Artificial Sequence
  Synthetic Sequence
agtcaccaac

SEQ ID NO: 1288 - DNA, 10 bp, Artificial Sequence
  Synthetic Sequence
aaacttactt

SEQ ID NO: 1289 - DNA, 10 bp, Artificial Sequence
  Synthetic Sequence
catatcagtg

SEQ ID NO: 1290 - DNA, 10 bp, Artificial Sequence
  Synthetic Sequence
tctgttggtg

SEQ ID NO: 1291 - DNA, 10 bp, Artificial Sequence
  Synthetic Sequence
gtctaattat

SEQ ID NO: 1292 - DNA, 10 bp, Artificial Sequence
  Synthetic Sequence
acaataccag

SEQ ID NO: 1293 - DNA, 10 bp, Artificial Sequence
  Synthetic Sequence
agagaatacg

SEQ ID NO: 1294 - DNA, 10 bp, Artificial Sequence
  Synthetic Sequence
cgacgacgtt

SEQ ID NO: 1295 - DNA, 10 bp, Artificial Sequence
  Synthetic Sequence
gcattccaat

SEQ ID NO: 1296 - DNA, 10 bp, Artificial Sequence
  Synthetic Sequence
aggtgttcaa

SEQ ID NO: 1297 - DNA, 10 bp, Artificial Sequence
  Synthetic Sequence
gacgtagatc

SEQ ID NO: 1298 - DNA, 10 bp, Artificial Sequence
  Synthetic Sequence
tcaatcttct

SEQ ID NO: 1299 - DNA, 10 bp, Artificial Sequence
  Synthetic Sequence
gattcatact

SEQ ID NO: 1300 - DNA, 10 bp, Artificial Sequence
  Synthetic Sequence
gcctcgtcag

SEQ ID NO: 1301 - DNA, 10 bp, Artificial Sequence
  Synthetic Sequence
tgaaagagaa

SEQ ID NO: 1302 - DNA, 10 bp, Artificial Sequence
  Synthetic Sequence
atatggtaaa

SEQ ID NO: 1303 - DNA, 10 bp, Artificial Sequence
  Synthetic Sequence
gcctatatac

SEQ ID NO: 1304 - DNA, 10 bp, Artificial Sequence
  Synthetic Sequence
gttcatctta

SEQ ID NO: 1305 - DNA, 10 bp, Artificial Sequence
  Synthetic Sequence
gttacgtgac

SEQ ID NO: 1306 - DNA, 10 bp, Artificial Sequence
  Synthetic Sequence
ggccaagaaa

SEQ ID NO: 1307 - DNA, 10 bp, Artificial Sequence
  Synthetic Sequence
actgtgcctg

SEQ ID NO: 1308 - DNA, 10 bp, Artificial Sequence
  Synthetic Sequence
cgcgctcact

SEQ ID NO: 1309 - DNA, 10 bp, Artificial Sequence
  Synthetic Sequence
ataacgtctc

SEQ ID NO: 1310 - DNA, 10 bp, Artificial Sequence
  Synthetic Sequence
ccaacagaca

SEQ ID NO: 1311 - DNA, 10 bp, Artificial Sequence
  Synthetic Sequence
gctgacatgt

SEQ ID NO: 1312 - DNA, 10 bp, Artificial Sequence
  Synthetic Sequence
atctacatgg

SEQ ID NO: 1313 - DNA, 10 bp, Artificial Sequence
  Synthetic Sequence
agttcgacca

SEQ ID NO: 1314 - DNA, 10 bp, Artificial Sequence
  Synthetic Sequence
agaggcttat

SEQ ID NO: 1315 - DNA, 10 bp, Artificial Sequence
  Synthetic Sequence
gtacgttagc

SEQ ID NO: 1316 - DNA, 10 bp, Artificial Sequence
  Synthetic Sequence
aactatgggt

SEQ ID NO: 1317 - DNA, 10 bp, Artificial Sequence
  Synthetic Sequence
tcagtcgctc

SEQ ID NO: 1318 - DNA, 10 bp, Artificial Sequence
  Synthetic Sequence
tcgcctgtgt

SEQ ID NO: 1319 - DNA, 10 bp, Artificial Sequence
  Synthetic Sequence
tcagaaactg

SEQ ID NO: 1320 - DNA, 10 bp, Artificial Sequence
  Synthetic Sequence
tacgtgtgcc

SEQ ID NO: 1321 - DNA, 10 bp, Artificial Sequence
  Synthetic Sequence
cgctcttaca

SEQ ID NO: 1322 - DNA, 10 bp, Artificial Sequence
  Synthetic Sequence
actagcagcg

SEQ ID NO: 1323 - DNA, 10 bp, Artificial Sequence
  Synthetic Sequence
ttctcgaggg

SEQ ID NO: 1324 - DNA, 10 bp, Artificial Sequence
  Synthetic Sequence
atctctgtca

SEQ ID NO: 1325 - DNA, 10 bp, Artificial Sequence
  Synthetic Sequence
ttgccgttgc

SEQ ID NO: 1326 - DNA, 10 bp, Artificial Sequence
  Synthetic Sequence
tacatggacg

SEQ ID NO: 1327 - DNA, 10 bp, Artificial Sequence
  Synthetic Sequence
ctagacgtac

SEQ ID NO: 1328 - DNA, 10 bp, Artificial Sequence
  Synthetic Sequence
cttgaccatt

SEQ ID NO: 1329 - DNA, 10 bp, Artificial Sequence
  Synthetic Sequence
accgcacatg

SEQ ID NO: 1330 - DNA, 10 bp, Artificial Sequence
  Synthetic Sequence
aggcacacac

SEQ ID NO: 1331 - DNA, 10 bp, Artificial Sequence
  Synthetic Sequence
tagtttgcca

SEQ ID NO: 1332 - DNA, 10 bp, Artificial Sequence
  Synthetic Sequence
tgacagacgc

SEQ ID NO: 1333 - DNA, 10 bp, Artificial Sequence
  Synthetic Sequence
acaagcaagt

SEQ ID NO: 1334 - DNA, 10 bp, Artificial Sequence
  Synthetic Sequence
cagtgcacca

SEQ ID NO: 1335 - DNA, 10 bp, Artificial Sequence
  Synthetic Sequence
cggtcgtttg

SEQ ID NO: 1336 - DNA, 10 bp, Artificial Sequence
  Synthetic Sequence
aacagtcttc

SEQ ID NO: 1337 - DNA, 10 bp, Artificial Sequence
  Synthetic Sequence
tcagtatgtt

SEQ ID NO: 1338 - DNA, 10 bp, Artificial Sequence
  Synthetic Sequence
cacatactga

SEQ ID NO: 1339 - DNA, 10 bp, Artificial Sequence
  Synthetic Sequence
taaggtcggg

SEQ ID NO: 1340 - DNA, 10 bp, Artificial Sequence
  Synthetic Sequence
aacgtctcgg

SEQ ID NO: 1341 - DNA, 10 bp, Artificial Sequence
  Synthetic Sequence
cgccatccta

SEQ ID NO: 1342 - DNA, 10 bp, Artificial Sequence
  Synthetic Sequence
gctaattcag

SEQ ID NO: 1343 - DNA, 10 bp, Artificial Sequence
  Synthetic Sequence
ctgtagtctt

SEQ ID NO: 1344 - DNA, 10 bp, Artificial Sequence
  Synthetic Sequence
agaaatatgc

SEQ ID NO: 1345 - DNA, 10 bp, Artificial Sequence
  Synthetic Sequence
ccatcatgac

SEQ ID NO: 1346 - DNA, 10 bp, Artificial Sequence
  Synthetic Sequence
ccgcagtcgt

SEQ ID NO: 1347 - DNA, 10 bp, Artificial Sequence
  Synthetic Sequence
ctggacagaa

SEQ ID NO: 1348 - DNA, 10 bp, Artificial Sequence
  Synthetic Sequence
ccttctgtgc

SEQ ID NO: 1349 - DNA, 10 bp, Artificial Sequence
  Synthetic Sequence
ggatcaagtt

SEQ ID NO: 1350 - DNA, 10 bp, Artificial Sequence
  Synthetic Sequence
aaaggtcgaa

SEQ ID NO: 1351 - DNA, 10 bp, Artificial Sequence
  Synthetic Sequence
gacccggtag

SEQ ID NO: 1352 - DNA, 10 bp, Artificial Sequence
  Synthetic Sequence
tggctatgat

SEQ ID NO: 1353 - DNA, 10 bp, Artificial Sequence
  Synthetic Sequence
agtcctaccg

SEQ ID NO: 1354 - DNA, 10 bp, Artificial Sequence
  Synthetic Sequence
ctaagcttca

SEQ ID NO: 1355 - DNA, 10 bp, Artificial Sequence
  Synthetic Sequence
ggataagcac

SEQ ID NO: 1356 - DNA, 10 bp, Artificial Sequence
  Synthetic Sequence
cttcgtcgca

SEQ ID NO: 1357 - DNA, 10 bp, Artificial Sequence
  Synthetic Sequence
acccgtaggt

SEQ ID NO: 1358 - DNA, 10 bp, Artificial Sequence
  Synthetic Sequence
tgaccgcaac

SEQ ID NO: 1359 - DNA, 10 bp, Artificial Sequence
  Synthetic Sequence
tgctgtccac

SEQ ID NO: 1360 - DNA, 10 bp, Artificial Sequence
  Synthetic Sequence
ggtgccgctt

SEQ ID NO: 1361 - DNA, 10 bp, Artificial Sequence
  Synthetic Sequence
ctaactcagg

SEQ ID NO: 1362 - DNA, 10 bp, Artificial Sequence
  Synthetic Sequence
agctgggatc

SEQ ID NO: 1363 - DNA, 10 bp, Artificial Sequence
  Synthetic Sequence
ttcgagctag

SEQ ID NO: 1364 - DNA, 10 bp, Artificial Sequence
  Synthetic Sequence
tctgtgaacg

SEQ ID NO: 1365 - DNA, 10 bp, Artificial Sequence
  Synthetic Sequence
ccatggataa

SEQ ID NO: 1366 - DNA, 10 bp, Artificial Sequence
  Synthetic Sequence
gagccaagcc

SEQ ID NO: 1367 - DNA, 10 bp, Artificial Sequence
  Synthetic Sequence
acatccctca

SEQ ID NO: 1368 - DNA, 10 bp, Artificial Sequence
  Synthetic Sequence
ttggatagct

SEQ ID NO: 1369 - DNA, 10 bp, Artificial Sequence
  Synthetic Sequence
taaagttcga

SEQ ID NO: 1370 - DNA, 10 bp, Artificial Sequence
  Synthetic Sequence
attcacaccc

SEQ ID NO: 1371 - DNA, 10 bp, Artificial Sequence
  Synthetic Sequence
gcgttacctc

SEQ ID NO: 1372 - DNA, 10 bp, Artificial Sequence
  Synthetic Sequence
cttccgaagg

SEQ ID NO: 1373 - DNA, 10 bp, Artificial Sequence
  Synthetic Sequence
gccaaatatc

SEQ ID NO: 1374 - DNA, 10 bp, Artificial Sequence
  Synthetic Sequence
ttaaggtgca

SEQ ID NO: 1375 - DNA, 10 bp, Artificial Sequence
  Synthetic Sequence
gtttctccgc

SEQ ID NO: 1376 - DNA, 10 bp, Artificial Sequence
  Synthetic Sequence
cgcgactcat

SEQ ID NO: 1377 - DNA, 10 bp, Artificial Sequence
  Synthetic Sequence
ctgggcatat

SEQ ID NO: 1378 - DNA, 10 bp, Artificial Sequence
  Synthetic Sequence
aagcatcgat

SEQ ID NO: 1379 - DNA, 10 bp, Artificial Sequence
  Synthetic Sequence
cataccctat

SEQ ID NO: 1380 - DNA, 10 bp, Artificial Sequence
  Synthetic Sequence
tcatcggaca

SEQ ID NO: 1381 - DNA, 10 bp, Artificial Sequence
  Synthetic Sequence
tctgaagatg

SEQ ID NO: 1382 - DNA, 10 bp, Artificial Sequence
  Synthetic Sequence
acataactgc

SEQ ID NO: 1383 - DNA, 10 bp, Artificial Sequence
  Synthetic Sequence
ataccaggtg

SEQ ID NO: 1384 - DNA, 10 bp, Artificial Sequence
  Synthetic Sequence
ggagagtagg

SEQ ID NO: 1385 - DNA, 10 bp, Artificial Sequence
  Synthetic Sequence
tctgcgtcgt

SEQ ID NO: 1386 - DNA, 10 bp, Artificial Sequence
  Synthetic Sequence
catctaatgt

SEQ ID NO: 1387 - DNA, 10 bp, Artificial Sequence
  Synthetic Sequence
gtattgctaa

SEQ ID NO: 1388 - DNA, 10 bp, Artificial Sequence
  Synthetic Sequence
agggtaaatt

SEQ ID NO: 1389 - DNA, 10 bp, Artificial Sequence
  Synthetic Sequence
ggtctgtagt

SEQ ID NO: 1390 - DNA, 10 bp, Artificial Sequence
  Synthetic Sequence
ttcctggcga

SEQ ID NO: 1391 - DNA, 10 bp, Artificial Sequence
  Synthetic Sequence
gttggacagc

SEQ ID NO: 1392 - DNA, 10 bp, Artificial Sequence
  Synthetic Sequence
gggtgcacag

SEQ ID NO: 1393 - DNA, 10 bp, Artificial Sequence
  Synthetic Sequence
cagagtagtc

SEQ ID NO: 1394 - DNA, 10 bp, Artificial Sequence
  Synthetic Sequence
ttatgcaaca

SEQ ID NO: 1395 - DNA, 10 bp, Artificial Sequence
  Synthetic Sequence
gtccctagcc

SEQ ID NO: 1396 - DNA, 10 bp, Artificial Sequence
  Synthetic Sequence
ccagtgactc

SEQ ID NO: 1397 - DNA, 10 bp, Artificial Sequence
  Synthetic Sequence
gaggtagggt

SEQ ID NO: 1398 - DNA, 10 bp, Artificial Sequence
  Synthetic Sequence
cttacacgct

SEQ ID NO: 1399 - DNA, 10 bp, Artificial Sequence
  Synthetic Sequence
tgagttgcgt

SEQ ID NO: 1400 - DNA, 10 bp, Artificial Sequence
  Synthetic Sequence
ggtgatgcag

SEQ ID NO: 1401 - DNA, 10 bp, Artificial Sequence
  Synthetic Sequence
acacataccc

SEQ ID NO: 1402 - DNA, 10 bp, Artificial Sequence
  Synthetic Sequence
atccagaata

SEQ ID NO: 1403 - DNA, 10 bp, Artificial Sequence
  Synthetic Sequence
tcgtgcgcct

SEQ ID NO: 1404 - DNA, 10 bp, Artificial Sequence
  Synthetic Sequence
acagcttgct

SEQ ID NO: 1405 - DNA, 10 bp, Artificial Sequence
  Synthetic Sequence
cgacccacct

SEQ ID NO: 1406 - DNA, 10 bp, Artificial Sequence
  Synthetic Sequence
gtcgaatatt

SEQ ID NO: 1407 - DNA, 10 bp, Artificial Sequence
  Synthetic Sequence
aacaggagtt

SEQ ID NO: 1408 - DNA, 10 bp, Artificial Sequence
  Synthetic Sequence
gactaccgtt

SEQ ID NO: 1409 - DNA, 10 bp, Artificial Sequence
  Synthetic Sequence
caaagtcgat

SEQ ID NO: 1410 - DNA, 10 bp, Artificial Sequence
  Synthetic Sequence
aaggaggccc

SEQ ID NO: 1411 - DNA, 10 bp, Artificial Sequence
  Synthetic Sequence
agtgacctcc

SEQ ID NO: 1412 - DNA, 10 bp, Artificial Sequence
  Synthetic Sequence
gtactataac

SEQ ID NO: 1413 - DNA, 10 bp, Artificial Sequence
  Synthetic Sequence
catggtaatg

SEQ ID NO: 1414 - DNA, 10 bp, Artificial Sequence
  Synthetic Sequence
caaggtacta

SEQ ID NO: 1415 - DNA, 10 bp, Artificial Sequence
  Synthetic Sequence
gtaatgctcg

SEQ ID NO: 1416 - DNA, 10 bp, Artificial Sequence
  Synthetic Sequence
tcgggagcca

SEQ ID NO: 1417 - DNA, 10 bp, Artificial Sequence
  Synthetic Sequence
tcttcggagg

SEQ ID NO: 1418 - DNA, 10 bp, Artificial Sequence
  Synthetic Sequence
caagtcaatg

SEQ ID NO: 1419 - DNA, 10 bp, Artificial Sequence
  Synthetic Sequence
atgatcgcca

SEQ ID NO: 1420 - DNA, 10 bp, Artificial Sequence
  Synthetic Sequence
tccgttcgcc

SEQ ID NO: 1421 - DNA, 10 bp, Artificial Sequence
  Synthetic Sequence
gtccatgcaa

SEQ ID NO: 1422 - DNA, 10 bp, Artificial Sequence
  Synthetic Sequence
gtttacatgc

SEQ ID NO: 1423 - DNA, 10 bp, Artificial Sequence
  Synthetic Sequence
aatggtattc

SEQ ID NO: 1424 - DNA, 10 bp, Artificial Sequence
  Synthetic Sequence
aggttagatc

SEQ ID NO: 1425 - DNA, 10 bp, Artificial Sequence
  Synthetic Sequence
acgacagtgt

SEQ ID NO: 1426 - DNA, 10 bp, Artificial Sequence
  Synthetic Sequence
taatgaggga

SEQ ID NO: 1427 - DNA, 10 bp, Artificial Sequence
  Synthetic Sequence
gactaccaga

SEQ ID NO: 1428 - DNA, 10 bp, Artificial Sequence
  Synthetic Sequence
catcgtatat

SEQ ID NO: 1429 - DNA, 10 bp, Artificial Sequence
  Synthetic Sequence
tgattagaag

SEQ ID NO: 1430 - DNA, 10 bp, Artificial Sequence
  Synthetic Sequence
ggcggattcc

SEQ ID NO: 1431 - DNA, 10 bp, Artificial Sequence
  Synthetic Sequence
acaccgtccc

SEQ ID NO: 1432 - DNA, 10 bp, Artificial Sequence
  Synthetic Sequence
atcccgagat

SEQ ID NO: 1433 - DNA, 10 bp, Artificial Sequence
  Synthetic Sequence
ataaggttgt

SEQ ID NO: 1434 - DNA, 10 bp, Artificial Sequence
  Synthetic Sequence
cgtctaattc

SEQ ID NO: 1435 - DNA, 10 bp, Artificial Sequence
  Synthetic Sequence
taatgctggt

SEQ ID NO: 1436 - DNA, 10 bp, Artificial Sequence
  Synthetic Sequence
tattaccaat

SEQ ID NO: 1437 - DNA, 10 bp, Artificial Sequence
  Synthetic Sequence
gttgtgtcgt

SEQ ID NO: 1438 - DNA, 10 bp, Artificial Sequence
  Synthetic Sequence
ccgcaagtag

SEQ ID NO: 1439 - DNA, 10 bp, Artificial Sequence
  Synthetic Sequence
cgacccgtta

SEQ ID NO: 1440 - DNA, 10 bp, Artificial Sequence
  Synthetic Sequence
agcccaggac

SEQ ID NO: 1441 - DNA, 10 bp, Artificial Sequence
  Synthetic Sequence
cacaggcaga

SEQ ID NO: 1442 - DNA, 10 bp, Artificial Sequence
  Synthetic Sequence
aatttagccg

SEQ ID NO: 1443 - DNA, 10 bp, Artificial Sequence
  Synthetic Sequence
aacacgggcg

SEQ ID NO: 1444 - DNA, 10 bp, Artificial Sequence
  Synthetic Sequence
agaggaagaa

SEQ ID NO: 1445 - DNA, 10 bp, Artificial Sequence
  Synthetic Sequence
ctttaaacca

SEQ ID NO: 1446 - DNA, 10 bp, Artificial Sequence
  Synthetic Sequence
aatgactgtg

SEQ ID NO: 1447 - DNA, 10 bp, Artificial Sequence
  Synthetic Sequence
aaagagcgtg

SEQ ID NO: 1448 - DNA, 10 bp, Artificial Sequence
  Synthetic Sequence
tcaaatggtg

SEQ ID NO: 1449 - DNA, 10 bp, Artificial Sequence
  Synthetic Sequence
tctctgtgga

SEQ ID NO: 1450 - DNA, 10 bp, Artificial Sequence
  Synthetic Sequence
gagaggatag

SEQ ID NO: 1451 - DNA, 10 bp, Artificial Sequence
  Synthetic Sequence
gtggcgtacc

SEQ ID NO: 1452 - DNA, 10 bp, Artificial Sequence
  Synthetic Sequence
ttcaattgac

SEQ ID NO: 1453 - DNA, 10 bp, Artificial Sequence
  Synthetic Sequence
aagtgtcgca

SEQ ID NO: 1454 - DNA, 10 bp, Artificial Sequence
  Synthetic Sequence
ccgagatcta

SEQ ID NO: 1455 - DNA, 10 bp, Artificial Sequence
  Synthetic Sequence
cgccacgtag

SEQ ID NO: 1456 - DNA, 10 bp, Artificial Sequence
  Synthetic Sequence
cctaagataa

SEQ ID NO: 1457 - DNA, 10 bp, Artificial Sequence
  Synthetic Sequence
ggcgtaaggc

SEQ ID NO: 1458 - DNA, 10 bp, Artificial Sequence
  Synthetic Sequence
aatatcccgt

SEQ ID NO: 1459 - DNA, 10 bp, Artificial Sequence
  Synthetic Sequence
cctccctcgt

SEQ ID NO: 1460 - DNA, 10 bp, Artificial Sequence
  Synthetic Sequence
cactgcggct

SEQ ID NO: 1461 - DNA, 10 bp, Artificial Sequence
  Synthetic Sequence
tacacccttt

SEQ ID NO: 1462 - DNA, 10 bp, Artificial Sequence
  Synthetic Sequence
tagctgggtt

SEQ ID NO: 1463 - DNA, 10 bp, Artificial Sequence
  Synthetic Sequence
cgagtgagtt

SEQ ID NO: 1464 - DNA, 10 bp, Artificial Sequence
  Synthetic Sequence
cccggaagtg

SEQ ID NO: 1465 - DNA, 10 bp, Artificial Sequence
  Synthetic Sequence
gatgggttga

SEQ ID NO: 1466 - DNA, 10 bp, Artificial Sequence
  Synthetic Sequence
ctcttccacc

SEQ ID NO: 1467 - DNA, 10 bp, Artificial Sequence
  Synthetic Sequence
aaaggacgcg

SEQ ID NO: 1468 - DNA, 10 bp, Artificial Sequence
  Synthetic Sequence
cgcctagata

SEQ ID NO: 1469 - DNA, 10 bp, Artificial Sequence
  Synthetic Sequence
tagggacagt

SEQ ID NO: 1470 - DNA, 10 bp, Artificial Sequence
  Synthetic Sequence
gccaaccacc

SEQ ID NO: 1471 - DNA, 10 bp, Artificial Sequence
  Synthetic Sequence
cgagaattgg

SEQ ID NO: 1472 - DNA, 10 bp, Artificial Sequence
  Synthetic Sequence
acacggcttt

SEQ ID NO: 1473 - DNA, 10 bp, Artificial Sequence
  Synthetic Sequence
tgcgggatag

SEQ ID NO: 1474 - DNA, 10 bp, Artificial Sequence
  Synthetic Sequence
taagactagt

SEQ ID NO: 1475 - DNA, 10 bp, Artificial Sequence
  Synthetic Sequence
gggtttaacc

SEQ ID NO: 1476 - DNA, 10 bp, Artificial Sequence
  Synthetic Sequence
ggtgctcgca

SEQ ID NO: 1477 - DNA, 10 bp, Artificial Sequence
  Synthetic Sequence
gaaacactgt

SEQ ID NO: 1478 - DNA, 10 bp, Artificial Sequence
  Synthetic Sequence
gcctattcaa

SEQ ID NO: 1479 - DNA, 10 bp, Artificial Sequence
  Synthetic Sequence
gcgactttcg

SEQ ID NO: 1480 - DNA, 10 bp, Artificial Sequence
  Synthetic Sequence
cacccacatc

SEQ ID NO: 1481 - DNA, 10 bp, Artificial Sequence
  Synthetic Sequence
aggcaacctt

SEQ ID NO: 1482 - DNA, 10 bp, Artificial Sequence
  Synthetic Sequence
cgtttcttaa

SEQ ID NO: 1483 - DNA, 10 bp, Artificial Sequence
  Synthetic Sequence
atggactacg

SEQ ID NO: 1484 - DNA, 10 bp, Artificial Sequence
  Synthetic Sequence
ttcctcggtg

SEQ ID NO: 1485 - DNA, 10 bp, Artificial Sequence
  Synthetic Sequence
gaactagtct

SEQ ID NO: 1486 - DNA, 10 bp, Artificial Sequence
  Synthetic Sequence
cctcggtaac

SEQ ID NO: 1487 - DNA, 10 bp, Artificial Sequence
  Synthetic Sequence
ggcgtgaatc

SEQ ID NO: 1488 - DNA, 10 bp, Artificial Sequence
  Synthetic Sequence
ggcctctgca

SEQ ID NO: 1489 - DNA, 10 bp, Artificial Sequence
  Synthetic Sequence
ttagcttaga

SEQ ID NO: 1490 - DNA, 10 bp, Artificial Sequence
  Synthetic Sequence
gggatacgtg

SEQ ID NO: 1491 - DNA, 10 bp, Artificial Sequence
  Synthetic Sequence
ttcgctcacc

SEQ ID NO: 1492 - DNA, 10 bp, Artificial Sequence
  Synthetic Sequence
gacgctcgaa

SEQ ID NO: 1493 - DNA, 10 bp, Artificial Sequence
  Synthetic Sequence
atggattatt

SEQ ID NO: 1494 - DNA, 10 bp, Artificial Sequence
  Synthetic Sequence
cgtagcccta

SEQ ID NO: 1495 - DNA, 10 bp, Artificial Sequence
  Synthetic Sequence
ttgaattgtt

SEQ ID NO: 1496 - DNA, 10 bp, Artificial Sequence
  Synthetic Sequence
tggtatggac

SEQ ID NO: 1497 - DNA, 10 bp, Artificial Sequence
  Synthetic Sequence
tagaacaggc

SEQ ID NO: 1498 - DNA, 10 bp, Artificial Sequence
  Synthetic Sequence
ccgcttgttg

SEQ ID NO: 1499 - DNA, 10 bp, Artificial Sequence
  Synthetic Sequence
acacgtaaat

SEQ ID NO: 1500 - DNA, 10 bp, Artificial Sequence
  Synthetic Sequence
aatgtcacat

SEQ ID NO: 1501 - DNA, 10 bp, Artificial Sequence
  Synthetic Sequence
gtcctagcag

SEQ ID NO: 1502 - DNA, 10 bp, Artificial Sequence
  Synthetic Sequence
cgtccaaacg

SEQ ID NO: 1503 - DNA, 10 bp, Artificial Sequence
  Synthetic Sequence
acgacccagt

SEQ ID NO: 1504 - DNA, 10 bp, Artificial Sequence
  Synthetic Sequence
ccatatatta

SEQ ID NO: 1505 - DNA, 10 bp, Artificial Sequence
  Synthetic Sequence
atccttccga

SEQ ID NO: 1506 - DNA, 10 bp, Artificial Sequence
  Synthetic Sequence
tatgaccgcg

SEQ ID NO: 1507 - DNA, 10 bp, Artificial Sequence
  Synthetic Sequence
attgagggtg

SEQ ID NO: 1508 - DNA, 10 bp, Artificial Sequence
  Synthetic Sequence
cattaactag

SEQ ID NO: 1509 - DNA, 10 bp, Artificial Sequence
  Synthetic Sequence
tactcctgcc

SEQ ID NO: 1510 - DNA, 10 bp, Artificial Sequence
  Synthetic Sequence
ttgacaacct

SEQ ID NO: 1511 - DNA, 10 bp, Artificial Sequence
  Synthetic Sequence
gatttcgact

SEQ ID NO: 1512 - DNA, 10 bp, Artificial Sequence
  Synthetic Sequence
ttagcacaat

SEQ ID NO: 1513 - DNA, 10 bp, Artificial Sequence
  Synthetic Sequence
gttcgctttg

SEQ ID NO: 1514 - DNA, 10 bp, Artificial Sequence
  Synthetic Sequence
ttgcaactgg

SEQ ID NO: 1515 - DNA, 10 bp, Artificial Sequence
  Synthetic Sequence
aattgccatt

SEQ ID NO: 1516 - DNA, 10 bp, Artificial Sequence
  Synthetic Sequence
cgccttccag

SEQ ID NO: 1517 - DNA, 10 bp, Artificial Sequence
  Synthetic Sequence
tgatgagctg

SEQ ID NO: 1518 - DNA, 10 bp, Artificial Sequence
  Synthetic Sequence
ccaccattta

SEQ ID NO: 1519 - DNA, 10 bp, Artificial Sequence
  Synthetic Sequence
ataatggcag

SEQ ID NO: 1520 - DNA, 10 bp, Artificial Sequence
  Synthetic Sequence
ctattccggt

SEQ ID NO: 1521 - DNA, 10 bp, Artificial Sequence
  Synthetic Sequence
tcgagtggcg

SEQ ID NO: 1522 - DNA, 10 bp, Artificial Sequence
  Synthetic Sequence
gcttataaca

SEQ ID NO: 1523 - DNA, 10 bp, Artificial Sequence
  Synthetic Sequence
taaatactaa

SEQ ID NO: 1524 - DNA, 10 bp, Artificial Sequence
  Synthetic Sequence
tcgttcaagc

SEQ ID NO: 1525 - DNA, 10 bp, Artificial Sequence
  Synthetic Sequence
gcagccctaa

SEQ ID NO: 1526 - DNA, 10 bp, Artificial Sequence
  Synthetic Sequence
acgggagcat

SEQ ID NO: 1527 - DNA, 10 bp, Artificial Sequence
  Synthetic Sequence
atagcagctc

SEQ ID NO: 1528 - DNA, 10 bp, Artificial Sequence
  Synthetic Sequence
acacttatag

SEQ ID NO: 1529 - DNA, 10 bp, Artificial Sequence
  Synthetic Sequence
gaggaggtat

SEQ ID NO: 1530 - DNA, 10 bp, Artificial Sequence
  Synthetic Sequence
gttgctccag

SEQ ID NO: 1531 - DNA, 10 bp, Artificial Sequence
  Synthetic Sequence
tgaggatact

SEQ ID NO: 1532 - DNA, 10 bp, Artificial Sequence
  Synthetic Sequence
caccataatt

SEQ ID NO: 1533 - DNA, 10 bp, Artificial Sequence
  Synthetic Sequence
actcgagagc

SEQ ID NO: 1534 - DNA, 10 bp, Artificial Sequence
  Synthetic Sequence
acagcccacc

SEQ ID NO: 1535 - DNA, 10 bp, Artificial Sequence
  Synthetic Sequence
gatacaaccc

SEQ ID NO: 1536 - DNA, 10 bp, Artificial Sequence
  Synthetic Sequence
tttggcggtt

SEQ ID NO: 1537 - DNA, 10 bp, Artificial Sequence
  Synthetic Sequence
ggtccattgg

SEQ ID NO: 1538 - DNA, 10 bp, Artificial Sequence
  Synthetic Sequence
ctccgatatc

SEQ ID NO: 1539 - DNA, 10 bp, Artificial Sequence
  Synthetic Sequence
atcgaccctt

SEQ ID NO: 1540 - DNA, 10 bp, Artificial Sequence
  Synthetic Sequence
aaagcttcgt

SEQ ID NO: 1541 - DNA, 10 bp, Artificial Sequence
  Synthetic Sequence
cctattgccc

SEQ ID NO: 1542 - DNA, 10 bp, Artificial Sequence
  Synthetic Sequence
aactacgctg

SEQ ID NO: 1543 - DNA, 10 bp, Artificial Sequence
  Synthetic Sequence
cttagtatgt

SEQ ID NO: 1544 - DNA, 10 bp, Artificial Sequence
  Synthetic Sequence
aatgtctccc

SEQ ID NO: 1545 - DNA, 10 bp, Artificial Sequence
  Synthetic Sequence
tcttatgtca

SEQ ID NO: 1546 - DNA, 10 bp, Artificial Sequence
  Synthetic Sequence
ttcccgaccg

SEQ ID NO: 1547 - DNA, 10 bp, Artificial Sequence
  Synthetic Sequence
gctctcgttg

SEQ ID NO: 1548 - DNA, 10 bp, Artificial Sequence
  Synthetic Sequence
ctaatgccgg

SEQ ID NO: 1549 - DNA, 10 bp, Artificial Sequence
  Synthetic Sequence
cccaaggacg

SEQ ID NO: 1550 - DNA, 10 bp, Artificial Sequence
  Synthetic Sequence
tgctcagctc

SEQ ID NO: 1551 - DNA, 10 bp, Artificial Sequence
  Synthetic Sequence
gttggcgatg

SEQ ID NO: 1552 - DNA, 10 bp, Artificial Sequence
  Synthetic Sequence
gtctttaact

SEQ ID NO: 1553 - DNA, 10 bp, Artificial Sequence
  Synthetic Sequence
gcggttcgat

SEQ ID NO: 1554 - DNA, 10 bp, Artificial Sequence
  Synthetic Sequence
agtccggaca

SEQ ID NO: 1555 - DNA, 10 bp, Artificial Sequence
  Synthetic Sequence
agcatggacc

SEQ ID NO: 1556 - DNA, 10 bp, Artificial Sequence
  Synthetic Sequence
ctgtgcttag

SEQ ID NO: 1557 - DNA, 10 bp, Artificial Sequence
  Synthetic Sequence
tgaacgaagc

SEQ ID NO: 1558 - DNA, 10 bp, Artificial Sequence
  Synthetic Sequence
acagatccgt

SEQ ID NO: 1559 - DNA, 10 bp, Artificial Sequence
  Synthetic Sequence
aacggcccta

SEQ ID NO: 1560 - DNA, 10 bp, Artificial Sequence
  Synthetic Sequence
caagatgctc

SEQ ID NO: 1561 - DNA, 10 bp, Artificial Sequence
  Synthetic Sequence
gcacgttgtt

SEQ ID NO: 1562 - DNA, 10 bp, Artificial Sequence
  Synthetic Sequence
gctagacagg

SEQ ID NO: 1563 - DNA, 10 bp, Artificial Sequence
  Synthetic Sequence
cctagtgttg

SEQ ID NO: 1564 - DNA, 10 bp, Artificial Sequence
  Synthetic Sequence
ttctctggcc

SEQ ID NO: 1565 - DNA, 10 bp, Artificial Sequence
  Synthetic Sequence
gtacagttgg

SEQ ID NO: 1566 - DNA, 10 bp, Artificial Sequence
  Synthetic Sequence
ctcagtctac

SEQ ID NO: 1567 - DNA, 10 bp, Artificial Sequence
  Synthetic Sequence
tcactatggc

SEQ ID NO: 1568 - DNA, 10 bp, Artificial Sequence
  Synthetic Sequence
gcagggagtc

SEQ ID NO: 1569 - DNA, 10 bp, Artificial Sequence
  Synthetic Sequence
aagacgttcc

SEQ ID NO: 1570 - DNA, 10 bp, Artificial Sequence
  Synthetic Sequence
aaccctccgc

SEQ ID NO: 1571 - DNA, 10 bp, Artificial Sequence
  Synthetic Sequence
gttagtcgcc

SEQ ID NO: 1572 - DNA, 10 bp, Artificial Sequence
  Synthetic Sequence
tgactagcgc

SEQ ID NO: 1573 - DNA, 10 bp, Artificial Sequence
  Synthetic Sequence
atacgcaatc

SEQ ID NO: 1574 - DNA, 10 bp, Artificial Sequence
  Synthetic Sequence
gaagattcgg

SEQ ID NO: 1575 - DNA, 10 bp, Artificial Sequence
  Synthetic Sequence
cgttcgcgag

SEQ ID NO: 1576 - DNA, 10 bp, Artificial Sequence
  Synthetic Sequence
ggtacccact

SEQ ID NO: 1577 - DNA, 10 bp, Artificial Sequence
  Synthetic Sequence
ccagtactgc

SEQ ID NO: 1578 - DNA, 10 bp, Artificial Sequence
  Synthetic Sequence
gttgtatcag

SEQ ID NO: 1579 - DNA, 10 bp, Artificial Sequence
  Synthetic Sequence
acgccaagcg

SEQ ID NO: 1580 - DNA, 10 bp, Artificial Sequence
  Synthetic Sequence
tatctggcag

SEQ ID NO: 1581 - DNA, 10 bp, Artificial Sequence
  Synthetic Sequence
atgatgccgc

SEQ ID NO: 1582 - DNA, 10 bp, Artificial Sequence
  Synthetic Sequence
tccagattcg

SEQ ID NO: 1583 - DNA, 10 bp, Artificial Sequence
  Synthetic Sequence
aacaagcacc

SEQ ID NO: 1584 - DNA, 10 bp, Artificial Sequence
  Synthetic Sequence
ctcgccgtga

SEQ ID NO: 1585 - DNA, 10 bp, Artificial Sequence
  Synthetic Sequence
aaatcgccga

SEQ ID NO: 1586 - DNA, 10 bp, Artificial Sequence
  Synthetic Sequence
aattagccac

SEQ ID NO: 1587 - DNA, 10 bp, Artificial Sequence
  Synthetic Sequence
cctcacgcct

SEQ ID NO: 1588 - DNA, 10 bp, Artificial Sequence
  Synthetic Sequence
ccgaccgcat

SEQ ID NO: 1589 - DNA, 10 bp, Artificial Sequence
  Synthetic Sequence
gtctggcatc

SEQ ID NO: 1590 - DNA, 10 bp, Artificial Sequence
  Synthetic Sequence
actggccaat

SEQ ID NO: 1591 - DNA, 10 bp, Artificial Sequence
  Synthetic Sequence
aatgagctca

SEQ ID NO: 1592 - DNA, 10 bp, Artificial Sequence
  Synthetic Sequence
gcctgcgttt

SEQ ID NO: 1593 - DNA, 10 bp, Artificial Sequence
  Synthetic Sequence
gcattgtagg

SEQ ID NO: 1594 - DNA, 10 bp, Artificial Sequence
  Synthetic Sequence
ctgatgttgt

SEQ ID NO: 1595 - DNA, 10 bp, Artificial Sequence
  Synthetic Sequence
cgactgttcc

SEQ ID NO: 1596 - DNA, 10 bp, Artificial Sequence
  Synthetic Sequence
acgtagttat

SEQ ID NO: 1597 - DNA, 10 bp, Artificial Sequence
  Synthetic Sequence
atcctcgtct

SEQ ID NO: 1598 - DNA, 10 bp, Artificial Sequence
  Synthetic Sequence
catggctgat

SEQ ID NO: 1599 - DNA, 10 bp, Artificial Sequence
  Synthetic Sequence
agatcttagc

SEQ ID NO: 1600 - DNA, 10 bp, Artificial Sequence
  Synthetic Sequence
ctcacgtgaa

SEQ ID NO: 1601 - DNA, 10 bp, Artificial Sequence
  Synthetic Sequence
tgaatgttga

SEQ ID NO: 1602 - DNA, 10 bp, Artificial Sequence
  Synthetic Sequence
ccttccgttg

SEQ ID NO: 1603 - DNA, 10 bp, Artificial Sequence
  Synthetic Sequence
ttacccaaag

SEQ ID NO: 1604 - DNA, 10 bp, Artificial Sequence
  Synthetic Sequence
ttcgcttaat

SEQ ID NO: 1605 - DNA, 10 bp, Artificial Sequence
  Synthetic Sequence
cgaaacagcc

SEQ ID NO: 1606 - DNA, 10 bp, Artificial Sequence
  Synthetic Sequence
agttactaca

SEQ ID NO: 1607 - DNA, 10 bp, Artificial Sequence
  Synthetic Sequence
ttcgtttcag

SEQ ID NO: 1608 - DNA, 10 bp, Artificial Sequence
  Synthetic Sequence
cacgctgtgt

SEQ ID NO: 1609 - DNA, 10 bp, Artificial Sequence
  Synthetic Sequence
aggcctgctc

SEQ ID NO: 1610 - DNA, 10 bp, Artificial Sequence
  Synthetic Sequence
tgcacgtagg

SEQ ID NO: 1611 - DNA, 10 bp, Artificial Sequence
  Synthetic Sequence
tagtttcagt

SEQ ID NO: 1612 - DNA, 10 bp, Artificial Sequence
  Synthetic Sequence
gtaaggattt

SEQ ID NO: 1613 - DNA, 10 bp, Artificial Sequence
  Synthetic Sequence
tcatgtggac

SEQ ID NO: 1614 - DNA, 10 bp, Artificial Sequence
  Synthetic Sequence
cctcgagttc

SEQ ID NO: 1615 - DNA, 10 bp, Artificial Sequence
  Synthetic Sequence
ggtctacggc

SEQ ID NO: 1616 - DNA, 10 bp, Artificial Sequence
  Synthetic Sequence
ttccttgaaa

SEQ ID NO: 1617 - DNA, 10 bp, Artificial Sequence
  Synthetic Sequence
cgtcttaacc

SEQ ID NO: 1618 - DNA, 10 bp, Artificial Sequence
  Synthetic Sequence
ctaataacaa

SEQ ID NO: 1619 - DNA, 10 bp, Artificial Sequence
  Synthetic Sequence
cgaagacatg

SEQ ID NO: 1620 - DNA, 10 bp, Artificial Sequence
  Synthetic Sequence
agccgtgctg

SEQ ID NO: 1621 - DNA, 10 bp, Artificial Sequence
  Synthetic Sequence
ctgtaggaac

SEQ ID NO: 1622 - DNA, 10 bp, Artificial Sequence
  Synthetic Sequence
cgtaaggcag

SEQ ID NO: 1623 - DNA, 10 bp, Artificial Sequence
  Synthetic Sequence
gatgtggaga

SEQ ID NO: 1624 - DNA, 10 bp, Artificial Sequence
  Synthetic Sequence
cgaacatagg

SEQ ID NO: 1625 - DNA, 10 bp, Artificial Sequence
  Synthetic Sequence
tcaataaagt

SEQ ID NO: 1626 - DNA, 10 bp, Artificial Sequence
  Synthetic Sequence
gtgtatcagc

SEQ ID NO: 1627 - DNA, 10 bp, Artificial Sequence
  Synthetic Sequence
cgccagacat

SEQ ID NO: 1628 - DNA, 10 bp, Artificial Sequence
  Synthetic Sequence
gtaatgaggt

SEQ ID NO: 1629 - DNA, 10 bp, Artificial Sequence
  Synthetic Sequence
acaaacgcac

SEQ ID NO: 1630 - DNA, 10 bp, Artificial Sequence
  Synthetic Sequence
tcgctgcaca

SEQ ID NO: 1631 - DNA, 10 bp, Artificial Sequence
  Synthetic Sequence
acaatttggc

SEQ ID NO: 1632 - DNA, 10 bp, Artificial Sequence
  Synthetic Sequence
agatctgcaa

SEQ ID NO: 1633 - DNA, 10 bp, Artificial Sequence
  Synthetic Sequence
cgtatgtgcc

SEQ ID NO: 1634 - DNA, 10 bp, Artificial Sequence
  Synthetic Sequence
acagcgaggt

SEQ ID NO: 1635 - DNA, 10 bp, Artificial Sequence
  Synthetic Sequence
ctgttagtta

SEQ ID NO: 1636 - DNA, 10 bp, Artificial Sequence
  Synthetic Sequence
gtgcacttta

SEQ ID NO: 1637 - DNA, 10 bp, Artificial Sequence
  Synthetic Sequence
gttaggtggg

SEQ ID NO: 1638 - DNA, 10 bp, Artificial Sequence
  Synthetic Sequence
gcctccctct

SEQ ID NO: 1639 - DNA, 10 bp, Artificial Sequence
  Synthetic Sequence
gggttaacat

SEQ ID NO: 1640 - DNA, 10 bp, Artificial Sequence
  Synthetic Sequence
ttcatagcgg

SEQ ID NO: 1641 - DNA, 10 bp, Artificial Sequence
  Synthetic Sequence
aataactaaa

SEQ ID NO: 1642 - DNA, 10 bp, Artificial Sequence
  Synthetic Sequence
caagtggaag

SEQ ID NO: 1643 - DNA, 10 bp, Artificial Sequence
  Synthetic Sequence
ctgacgactg

SEQ ID NO: 1644 - DNA, 10 bp, Artificial Sequence
  Synthetic Sequence
ataatgcaca

SEQ ID NO: 1645 - DNA, 10 bp, Artificial Sequence
  Synthetic Sequence
cctccacctg

SEQ ID NO: 1646 - DNA, 10 bp, Artificial Sequence
  Synthetic Sequence
gtctaggaga

SEQ ID NO: 1647 - DNA, 10 bp, Artificial Sequence
  Synthetic Sequence
gtagcactca

SEQ ID NO: 1648 - DNA, 10 bp, Artificial Sequence
  Synthetic Sequence
tctccgtgtg

SEQ ID NO: 1649 - DNA, 10 bp, Artificial Sequence
  Synthetic Sequence
tatgggtcgg

SEQ ID NO: 1650 - DNA, 10 bp, Artificial Sequence
  Synthetic Sequence
attctctggt

SEQ ID NO: 1651 - DNA, 10 bp, Artificial Sequence
  Synthetic Sequence
ccctgccact

SEQ ID NO: 1652 - DNA, 10 bp, Artificial Sequence
  Synthetic Sequence
tcggatcaga

SEQ ID NO: 1653 - DNA, 10 bp, Artificial Sequence
  Synthetic Sequence
gccaaagtac

SEQ ID NO: 1654 - DNA, 10 bp, Artificial Sequence
  Synthetic Sequence
ccgtttcata

SEQ ID NO: 1655 - DNA, 10 bp, Artificial Sequence
  Synthetic Sequence
tgctggttga

SEQ ID NO: 1656 - DNA, 10 bp, Artificial Sequence
  Synthetic Sequence
ggctgtagta

SEQ ID NO: 1657 - DNA, 10 bp, Artificial Sequence
  Synthetic Sequence
cagtgctagc

SEQ ID NO: 1658 - DNA, 10 bp, Artificial Sequence
  Synthetic Sequence
ataggtctgc

SEQ ID NO: 1659 - DNA, 10 bp, Artificial Sequence
  Synthetic Sequence
ataactggaa

SEQ ID NO: 1660 - DNA, 10 bp, Artificial Sequence
  Synthetic Sequence
ccacaagaat

SEQ ID NO: 1661 - DNA, 10 bp, Artificial Sequence
  Synthetic Sequence
atgtagccga

SEQ ID NO: 1662 - DNA, 10 bp, Artificial Sequence
  Synthetic Sequence
gagaactggg

SEQ ID NO: 1663 - DNA, 10 bp, Artificial Sequence
  Synthetic Sequence
agaatgtact

SEQ ID NO: 1664 - DNA, 10 bp, Artificial Sequence
  Synthetic Sequence
caggttgtgc

SEQ ID NO: 1665 - DNA, 10 bp, Artificial Sequence
  Synthetic Sequence
tatgatccgg

SEQ ID NO: 1666 - DNA, 10 bp, Artificial Sequence
  Synthetic Sequence
aaattcggct

SEQ ID NO: 1667 - DNA, 10 bp, Artificial Sequence
  Synthetic Sequence
gtgaaagtta

SEQ ID NO: 1668 - DNA, 10 bp, Artificial Sequence
  Synthetic Sequence
gtccaggaac

SEQ ID NO: 1669 - DNA, 10 bp, Artificial Sequence
  Synthetic Sequence
ggataatggt

SEQ ID NO: 1670 - DNA, 10 bp, Artificial Sequence
  Synthetic Sequence
gtctctgttc

SEQ ID NO: 1671 - DNA, 10 bp, Artificial Sequence
  Synthetic Sequence
ctaccgaaat

SEQ ID NO: 1672 - DNA, 10 bp, Artificial Sequence
  Synthetic Sequence
cgttgtgctt

SEQ ID NO: 1673 - DNA, 10 bp, Artificial Sequence
  Synthetic Sequence
ggtctcccaa

SEQ ID NO: 1674 - DNA, 10 bp, Artificial Sequence
  Synthetic Sequence
actagtatgg

SEQ ID NO: 1675 - DNA, 10 bp, Artificial Sequence
  Synthetic Sequence
acgtggttcc

SEQ ID NO: 1676 - DNA, 10 bp, Artificial Sequence
  Synthetic Sequence
gccatgctaa

SEQ ID NO: 1677 - DNA, 10 bp, Artificial Sequence
  Synthetic Sequence
ccagcggcta

SEQ ID NO: 1678 - DNA, 10 bp, Artificial Sequence
  Synthetic Sequence
gattatactg

SEQ ID NO: 1679 - DNA, 10 bp, Artificial Sequence
  Synthetic Sequence
tcgtggctgg

SEQ ID NO: 1680 - DNA, 10 bp, Artificial Sequence
  Synthetic Sequence
tctgaacggg

SEQ ID NO: 1681 - DNA, 10 bp, Artificial Sequence
  Synthetic Sequence
agggtataca

SEQ ID NO: 1682 - DNA, 10 bp, Artificial Sequence
  Synthetic Sequence
gctgtattac

SEQ ID NO: 1683 - DNA, 10 bp, Artificial Sequence
  Synthetic Sequence
ggatcacgac

SEQ ID NO: 1684 - DNA, 10 bp, Artificial Sequence
  Synthetic Sequence
cacgccttag

SEQ ID NO: 1685 - DNA, 10 bp, Artificial Sequence
  Synthetic Sequence
gccgtttagg

SEQ ID NO: 1686 - DNA, 10 bp, Artificial Sequence
  Synthetic Sequence
gctgcctaaa

SEQ ID NO: 1687 - DNA, 10 bp, Artificial Sequence
  Synthetic Sequence
gtttatagtt

SEQ ID NO: 1688 - DNA, 10 bp, Artificial Sequence
  Synthetic Sequence
agtaggcaac

SEQ ID NO: 1689 - DNA, 10 bp, Artificial Sequence
  Synthetic Sequence
tggtggagag

SEQ ID NO: 1690 - DNA, 10 bp, Artificial Sequence
  Synthetic Sequence
cttgaactgg

SEQ ID NO: 1691 - DNA, 10 bp, Artificial Sequence
  Synthetic Sequence
actcaacatg

SEQ ID NO: 1692 - DNA, 10 bp, Artificial Sequence
  Synthetic Sequence
gtagatgcgc

SEQ ID NO: 1693 - DNA, 10 bp, Artificial Sequence
  Synthetic Sequence
ccacgtgcgt

SEQ ID NO: 1694 - DNA, 10 bp, Artificial Sequence
  Synthetic Sequence
tatgtgcagg

SEQ ID NO: 1695 - DNA, 10 bp, Artificial Sequence
  Synthetic Sequence
gcccacataa

SEQ ID NO: 1696 - DNA, 10 bp, Artificial Sequence
  Synthetic Sequence
agatttcaag

SEQ ID NO: 1697 - DNA, 10 bp, Artificial Sequence
  Synthetic Sequence
acccgatcgg

SEQ ID NO: 1698 - DNA, 10 bp, Artificial Sequence
  Synthetic Sequence
cgtgagagtc

SEQ ID NO: 1699 - DNA, 10 bp, Artificial Sequence
  Synthetic Sequence
gcgtgtgtgt

SEQ ID NO: 1700 - DNA, 10 bp, Artificial Sequence
  Synthetic Sequence
ttactcctcc

SEQ ID NO: 1701 - DNA, 10 bp, Artificial Sequence
  Synthetic Sequence
gaacctagcg

SEQ ID NO: 1702 - DNA, 10 bp, Artificial Sequence
  Synthetic Sequence
aacgcgacga

SEQ ID NO: 1703 - DNA, 10 bp, Artificial Sequence
  Synthetic Sequence
acgtgggact

SEQ ID NO: 1704 - DNA, 10 bp, Artificial Sequence
  Synthetic Sequence
atacctaatg

SEQ ID NO: 1705 - DNA, 10 bp, Artificial Sequence
  Synthetic Sequence
catcccttcc

SEQ ID NO: 1706 - DNA, 10 bp, Artificial Sequence
  Synthetic Sequence
atgtttcctt

SEQ ID NO: 1707 - DNA, 10 bp, Artificial Sequence
  Synthetic Sequence
gagcactaac

SEQ ID NO: 1708 - DNA, 10 bp, Artificial Sequence
  Synthetic Sequence
ttagaatgat

SEQ ID NO: 1709 - DNA, 10 bp, Artificial Sequence
  Synthetic Sequence
tgtgcatcac

SEQ ID NO: 1710 - DNA, 10 bp, Artificial Sequence
  Synthetic Sequence
cgaactccgc

SEQ ID NO: 1711 - DNA, 10 bp, Artificial Sequence
  Synthetic Sequence
agtattcgca

SEQ ID NO: 1712 - DNA, 10 bp, Artificial Sequence
  Synthetic Sequence
ggagtccaca

SEQ ID NO: 1713 - DNA, 10 bp, Artificial Sequence
  Synthetic Sequence
gagtagtgtt

SEQ ID NO: 1714 - DNA, 10 bp, Artificial Sequence
  Synthetic Sequence
taaccgtagg

SEQ ID NO: 1715 - DNA, 10 bp, Artificial Sequence
  Synthetic Sequence
gcattctgtt

SEQ ID NO: 1716 - DNA, 10 bp, Artificial Sequence
  Synthetic Sequence
aagtagaaca

SEQ ID NO: 1717 - DNA, 10 bp, Artificial Sequence
  Synthetic Sequence
aatcgcgaaa

SEQ ID NO: 1718 - DNA, 10 bp, Artificial Sequence
  Synthetic Sequence
ggttgcgatt

SEQ ID NO: 1719 - DNA, 10 bp, Artificial Sequence
  Synthetic Sequence
tgtaaatgtg

SEQ ID NO: 1720 - DNA, 10 bp, Artificial Sequence
  Synthetic Sequence
tgcagtgacc

SEQ ID NO: 1721 - DNA, 10 bp, Artificial Sequence
  Synthetic Sequence
gctccgaggt

SEQ ID NO: 1722 - DNA, 10 bp, Artificial Sequence
  Synthetic Sequence
tgttatatta

SEQ ID NO: 1723 - DNA, 10 bp, Artificial Sequence
  Synthetic Sequence
gactctgtaa

SEQ ID NO: 1724 - DNA, 10 bp, Artificial Sequence
  Synthetic Sequence
acgtatcgcc

SEQ ID NO: 1725 - DNA, 10 bp, Artificial Sequence
  Synthetic Sequence
gattagtgaa

SEQ ID NO: 1726 - DNA, 10 bp, Artificial Sequence
  Synthetic Sequence
gacgggagca

SEQ ID NO: 1727 - DNA, 10 bp, Artificial Sequence
  Synthetic Sequence
gccatcaggt

SEQ ID NO: 1728 - DNA, 10 bp, Artificial Sequence
  Synthetic Sequence
ggagcgacag

SEQ ID NO: 1729 - DNA, 10 bp, Artificial Sequence
  Synthetic Sequence
tgatccggga

SEQ ID NO: 1730 - DNA, 10 bp, Artificial Sequence
  Synthetic Sequence
ggatccatac

SEQ ID NO: 1731 - DNA, 10 bp, Artificial Sequence
  Synthetic Sequence
cacatcttcg

SEQ ID NO: 1732 - DNA, 10 bp, Artificial Sequence
  Synthetic Sequence
cctcagggac

SEQ ID NO: 1733 - DNA, 10 bp, Artificial Sequence
  Synthetic Sequence
tcccacgtga

SEQ ID NO: 1734 - DNA, 10 bp, Artificial Sequence
  Synthetic Sequence
ccggtacacg

SEQ ID NO: 1735 - DNA, 10 bp, Artificial Sequence
  Synthetic Sequence
atttcaggta

SEQ ID NO: 1736 - DNA, 10 bp, Artificial Sequence
  Synthetic Sequence
attggttgcg

SEQ ID NO: 1737 - DNA, 10 bp, Artificial Sequence
  Synthetic Sequence
aagggtacag

SEQ ID NO: 1738 - DNA, 10 bp, Artificial Sequence
  Synthetic Sequence
ggcgactttc

SEQ ID NO: 1739 - DNA, 10 bp, Artificial Sequence
  Synthetic Sequence
gtaatagtca

SEQ ID NO: 1740 - DNA, 10 bp, Artificial Sequence
  Synthetic Sequence
attatggtta

SEQ ID NO: 1741 - DNA, 10 bp, Artificial Sequence
  Synthetic Sequence
aacgccacct

SEQ ID NO: 1742 - DNA, 10 bp, Artificial Sequence
  Synthetic Sequence
taggctaaac

SEQ ID NO: 1743 - DNA, 10 bp, Artificial Sequence
  Synthetic Sequence
gaaacccaca

SEQ ID NO: 1744 - DNA, 10 bp, Artificial Sequence
  Synthetic Sequence
cgagtaggcg

SEQ ID NO: 1745 - DNA, 10 bp, Artificial Sequence
  Synthetic Sequence
atgggccaga

SEQ ID NO: 1746 - DNA, 10 bp, Artificial Sequence
  Synthetic Sequence
cgtcctggag

SEQ ID NO: 1747 - DNA, 10 bp, Artificial Sequence
  Synthetic Sequence
ctttagcgcg

SEQ ID NO: 1748 - DNA, 10 bp, Artificial Sequence
  Synthetic Sequence
cggcatctca

SEQ ID NO: 1749 - DNA, 10 bp, Artificial Sequence
  Synthetic Sequence
aaagctccta

SEQ ID NO: 1750 - DNA, 10 bp, Artificial Sequence
  Synthetic Sequence
tctcgttgtc

SEQ ID NO: 1751 - DNA, 10 bp, Artificial Sequence
  Synthetic Sequence
aacccgccag

SEQ ID NO: 1752 - DNA, 10 bp, Artificial Sequence
  Synthetic Sequence
tatcatatca

SEQ ID NO: 1753 - DNA, 10 bp, Artificial Sequence
  Synthetic Sequence
tcgagttcat

SEQ ID NO: 1754 - DNA, 10 bp, Artificial Sequence
  Synthetic Sequence
aatcgaggtg

SEQ ID NO: 1755 - DNA, 10 bp, Artificial Sequence
  Synthetic Sequence
attgcataac

SEQ ID NO: 1756 - DNA, 10 bp, Artificial Sequence
  Synthetic Sequence
tcaagatatg

SEQ ID NO: 1757 - DNA, 10 bp, Artificial Sequence
  Synthetic Sequence
ttgtgtgcgg

SEQ ID NO: 1758 - DNA, 10 bp, Artificial Sequence
  Synthetic Sequence
gacactcatc

SEQ ID NO: 1759 - DNA, 10 bp, Artificial Sequence
  Synthetic Sequence
tggcaccata

SEQ ID NO: 1760 - DNA, 10 bp, Artificial Sequence
  Synthetic Sequence
ggacgtcaag

SEQ ID NO: 1761 - DNA, 10 bp, Artificial Sequence
  Synthetic Sequence
gagtaagaat

SEQ ID NO: 1762 - DNA, 10 bp, Artificial Sequence
  Synthetic Sequence
tgctaaacgc

SEQ ID NO: 1763 - DNA, 10 bp, Artificial Sequence
  Synthetic Sequence
cgcacgctaa

SEQ ID NO: 1764 - DNA, 10 bp, Artificial Sequence
  Synthetic Sequence
cccactctag

SEQ ID NO: 1765 - DNA, 10 bp, Artificial Sequence
  Synthetic Sequence
cgttgatact

SEQ ID NO: 1766 - DNA, 10 bp, Artificial Sequence
  Synthetic Sequence
aattaacgca

SEQ ID NO: 1767 - DNA, 10 bp, Artificial Sequence
  Synthetic Sequence
aagatagagc

SEQ ID NO: 1768 - DNA, 10 bp, Artificial Sequence
  Synthetic Sequence
gctctttatc

SEQ ID NO: 1769 - DNA, 10 bp, Artificial Sequence
  Synthetic Sequence
gagaccagag

SEQ ID NO: 1770 - DNA, 10 bp, Artificial Sequence
  Synthetic Sequence
gcgccgcttt

SEQ ID NO: 1771 - DNA, 10 bp, Artificial Sequence
  Synthetic Sequence
acttaagtta

SEQ ID NO: 1772 - DNA, 10 bp, Artificial Sequence
  Synthetic Sequence
cacacaattc

SEQ ID NO: 1773 - DNA, 10 bp, Artificial Sequence
  Synthetic Sequence
tacgcccagc

SEQ ID NO: 1774 - DNA, 10 bp, Artificial Sequence
  Synthetic Sequence
ctgacttgcc

SEQ ID NO: 1775 - DNA, 10 bp, Artificial Sequence
  Synthetic Sequence
aatcggtata

SEQ ID NO: 1776 - DNA, 10 bp, Artificial Sequence
  Synthetic Sequence
catacgcccg

SEQ ID NO: 1777 - DNA, 10 bp, Artificial Sequence
  Synthetic Sequence
attcaactgc

SEQ ID NO: 1778 - DNA, 10 bp, Artificial Sequence
  Synthetic Sequence
atatcagtat

SEQ ID NO: 1779 - DNA, 10 bp, Artificial Sequence
  Synthetic Sequence
tcggtattcc

SEQ ID NO: 1780 - DNA, 10 bp, Artificial Sequence
  Synthetic Sequence
tcgcaaactc

SEQ ID NO: 1781 - DNA, 10 bp, Artificial Sequence
  Synthetic Sequence
ctagctggtc

SEQ ID NO: 1782 - DNA, 10 bp, Artificial Sequence
  Synthetic Sequence
tcgagtctgt

SEQ ID NO: 1783 - DNA, 10 bp, Artificial Sequence
  Synthetic Sequence
agctaggctt

SEQ ID NO: 1784 - DNA, 10 bp, Artificial Sequence
  Synthetic Sequence
gtggatccct

SEQ ID NO: 1785 - DNA, 10 bp, Artificial Sequence
  Synthetic Sequence
cagaacggtg

SEQ ID NO: 1786 - DNA, 10 bp, Artificial Sequence
  Synthetic Sequence
agtgtggcgg

SEQ ID NO: 1787 - DNA, 10 bp, Artificial Sequence
  Synthetic Sequence
aaagacttac

SEQ ID NO: 1788 - DNA, 10 bp, Artificial Sequence
  Synthetic Sequence
tctatgagct

SEQ ID NO: 1789 - DNA, 10 bp, Artificial Sequence
  Synthetic Sequence
gcgtacggac

SEQ ID NO: 1790 - DNA, 10 bp, Artificial Sequence
  Synthetic Sequence
gctagttatg

SEQ ID NO: 1791 - DNA, 10 bp, Artificial Sequence
  Synthetic Sequence
aaggccaggg

SEQ ID NO: 1792 - DNA, 10 bp, Artificial Sequence
  Synthetic Sequence
acgttatcca

SEQ ID NO: 1793 - DNA, 10 bp, Artificial Sequence
  Synthetic Sequence
gcctcagaac

SEQ ID NO: 1794 - DNA, 10 bp, Artificial Sequence
  Synthetic Sequence
gttagtctag

SEQ ID NO: 1795 - DNA, 10 bp, Artificial Sequence
  Synthetic Sequence
cggttaacca

SEQ ID NO: 1796 - DNA, 10 bp, Artificial Sequence
  Synthetic Sequence
caatagaggt

SEQ ID NO: 1797 - DNA, 10 bp, Artificial Sequence
  Synthetic Sequence
cgcatagact

SEQ ID NO: 1798 - DNA, 10 bp, Artificial Sequence
  Synthetic Sequence
acagtaggga

SEQ ID NO: 1799 - DNA, 10 bp, Artificial Sequence
  Synthetic Sequence
cgtctaggga

SEQ ID NO: 1800 - DNA, 10 bp, Artificial Sequence
  Synthetic Sequence
caccgagcaa

SEQ ID NO: 1801 - DNA, 10 bp, Artificial Sequence
  Synthetic Sequence
cttattctaa

SEQ ID NO: 1802 - DNA, 10 bp, Artificial Sequence
  Synthetic Sequence
ggacgggaca

SEQ ID NO: 1803 - DNA, 10 bp, Artificial Sequence
  Synthetic Sequence
cggtacctta

SEQ ID NO: 1804 - DNA, 10 bp, Artificial Sequence
  Synthetic Sequence
ccttgcaaac

SEQ ID NO: 1805 - DNA, 10 bp, Artificial Sequence
  Synthetic Sequence
caaacctttg

SEQ ID NO: 1806 - DNA, 10 bp, Artificial Sequence
  Synthetic Sequence
tgggcttctt

SEQ ID NO: 1807 - DNA, 10 bp, Artificial Sequence
  Synthetic Sequence
tccctaagat

SEQ ID NO: 1808 - DNA, 10 bp, Artificial Sequence
  Synthetic Sequence
agatggtcac

SEQ ID NO: 1809 - DNA, 10 bp, Artificial Sequence
  Synthetic Sequence
aagagatctc

SEQ ID NO: 1810 - DNA, 10 bp, Artificial Sequence
  Synthetic Sequence
tttaatttgc

SEQ ID NO: 1811 - DNA, 10 bp, Artificial Sequence
  Synthetic Sequence
cacttgcgga

SEQ ID NO: 1812 - DNA, 10 bp, Artificial Sequence
  Synthetic Sequence
gtccggcctt

SEQ ID NO: 1813 - DNA, 10 bp, Artificial Sequence
  Synthetic Sequence
ggtagagttt

SEQ ID NO: 1814 - DNA, 10 bp, Artificial Sequence
  Synthetic Sequence
gcatcgtgcg

SEQ ID NO: 1815 - DNA, 10 bp, Artificial Sequence
  Synthetic Sequence
gtgggtctcc

SEQ ID NO: 1816 - DNA, 10 bp, Artificial Sequence
  Synthetic Sequence
atagacctct

SEQ ID NO: 1817 - DNA, 10 bp, Artificial Sequence
  Synthetic Sequence
ctggagtgac

SEQ ID NO: 1818 - DNA, 10 bp, Artificial Sequence
  Synthetic Sequence
tgtggaggtg

SEQ ID NO: 1819 - DNA, 10 bp, Artificial Sequence
  Synthetic Sequence
gggagaggga

SEQ ID NO: 1820 - DNA, 10 bp, Artificial Sequence
  Synthetic Sequence
tattgagcca

SEQ ID NO: 1821 - DNA, 10 bp, Artificial Sequence
  Synthetic Sequence
ctagagtccg

SEQ ID NO: 1822 - DNA, 10 bp, Artificial Sequence
  Synthetic Sequence
tcgttgtgca

SEQ ID NO: 1823 - DNA, 10 bp, Artificial Sequence
  Synthetic Sequence
aagacatccg

SEQ ID NO: 1824 - DNA, 10 bp, Artificial Sequence
  Synthetic Sequence
gggcgactgt

SEQ ID NO: 1825 - DNA, 10 bp, Artificial Sequence
  Synthetic Sequence
tagatacgga

SEQ ID NO: 1826 - DNA, 10 bp, Artificial Sequence
  Synthetic Sequence
atcgaaatga

SEQ ID NO: 1827 - DNA, 10 bp, Artificial Sequence
  Synthetic Sequence
gtaaaccgct

SEQ ID NO: 1828 - DNA, 10 bp, Artificial Sequence
  Synthetic Sequence
agttctttct

SEQ ID NO: 1829 - DNA, 10 bp, Artificial Sequence
  Synthetic Sequence
ttaattatcc

SEQ ID NO: 1830 - DNA, 10 bp, Artificial Sequence
  Synthetic Sequence
atatcaaacg

SEQ ID NO: 1831 - DNA, 10 bp, Artificial Sequence
  Synthetic Sequence
gcggactcga

SEQ ID NO: 1832 - DNA, 10 bp, Artificial Sequence
  Synthetic Sequence
accttatcgt

SEQ ID NO: 1833 - DNA, 10 bp, Artificial Sequence
  Synthetic Sequence
tgatggttcg

SEQ ID NO: 1834 - DNA, 10 bp, Artificial Sequence
  Synthetic Sequence
tgttgatcat

SEQ ID NO: 1835 - DNA, 10 bp, Artificial Sequence
  Synthetic Sequence
gacttgtaca

SEQ ID NO: 1836 - DNA, 10 bp, Artificial Sequence
  Synthetic Sequence
atatcacgtc

SEQ ID NO: 1837 - DNA, 10 bp, Artificial Sequence
  Synthetic Sequence
gggttcttgg

SEQ ID NO: 1838 - DNA, 10 bp, Artificial Sequence
  Synthetic Sequence
gcgcattact

SEQ ID NO: 1839 - DNA, 10 bp, Artificial Sequence
  Synthetic Sequence
tagtactgac

SEQ ID NO: 1840 - DNA, 10 bp, Artificial Sequence
  Synthetic Sequence
agctacgaac

SEQ ID NO: 1841 - DNA, 10 bp, Artificial Sequence
  Synthetic Sequence
aagactcatt

SEQ ID NO: 1842 - DNA, 10 bp, Artificial Sequence
  Synthetic Sequence
gatcctgtgg

SEQ ID NO: 1843 - DNA, 10 bp, Artificial Sequence
  Synthetic Sequence
tgcccaaagt

SEQ ID NO: 1844 - DNA, 10 bp, Artificial Sequence
  Synthetic Sequence
ctataaatcg

SEQ ID NO: 1845 - DNA, 10 bp, Artificial Sequence
  Synthetic Sequence
ttctctattg

SEQ ID NO: 1846 - DNA, 10 bp, Artificial Sequence
  Synthetic Sequence
acccaaacta

SEQ ID NO: 1847 - DNA, 10 bp, Artificial Sequence
  Synthetic Sequence
tgtgggccta

SEQ ID NO: 1848 - DNA, 10 bp, Artificial Sequence
  Synthetic Sequence
cgttacctcg

SEQ ID NO: 1849 - DNA, 10 bp, Artificial Sequence
  Synthetic Sequence
actaccaagg

SEQ ID NO: 1850 - DNA, 10 bp, Artificial Sequence
  Synthetic Sequence
gcaccatacg

SEQ ID NO: 1851 - DNA, 10 bp, Artificial Sequence
  Synthetic Sequence
cgcctatcac

SEQ ID NO: 1852 - DNA, 10 bp, Artificial Sequence
  Synthetic Sequence
gtagaagacg

SEQ ID NO: 1853 - DNA, 10 bp, Artificial Sequence
  Synthetic Sequence
aactgccacg

SEQ ID NO: 1854 - DNA, 10 bp, Artificial Sequence
  Synthetic Sequence
tagcgggtac

SEQ ID NO: 1855 - DNA, 10 bp, Artificial Sequence
  Synthetic Sequence
ctaagccgac

SEQ ID NO: 1856 - DNA, 10 bp, Artificial Sequence
  Synthetic Sequence
gcgttactca

SEQ ID NO: 1857 - DNA, 10 bp, Artificial Sequence
  Synthetic Sequence
ttcagataaa

SEQ ID NO: 1858 - DNA, 10 bp, Artificial Sequence
  Synthetic Sequence
aaataaatga

SEQ ID NO: 1859 - DNA, 10 bp, Artificial Sequence
  Synthetic Sequence
attggtacta

SEQ ID NO: 1860 - DNA, 10 bp, Artificial Sequence
  Synthetic Sequence
atgactactt

SEQ ID NO: 1861 - DNA, 10 bp, Artificial Sequence
  Synthetic Sequence
cgatgaggtc

SEQ ID NO: 1862 - DNA, 10 bp, Artificial Sequence
  Synthetic Sequence
ggctaaatag

SEQ ID NO: 1863 - DNA, 10 bp, Artificial Sequence
  Synthetic Sequence
ggacttagga

SEQ ID NO: 1864 - DNA, 10 bp, Artificial Sequence
  Synthetic Sequence
cttgtgttta

SEQ ID NO: 1865 - DNA, 10 bp, Artificial Sequence
  Synthetic Sequence
tagaggctca

SEQ ID NO: 1866 - DNA, 10 bp, Artificial Sequence
  Synthetic Sequence
gggcgtagac

SEQ ID NO: 1867 - DNA, 10 bp, Artificial Sequence
  Synthetic Sequence
ggtgtttaaa

SEQ ID NO: 1868 - DNA, 10 bp, Artificial Sequence
  Synthetic Sequence
ggatagtaca

SEQ ID NO: 1869 - DNA, 10 bp, Artificial Sequence
  Synthetic Sequence
ccaacttaaa

SEQ ID NO: 1870 - DNA, 10 bp, Artificial Sequence
  Synthetic Sequence
agccaccagt

SEQ ID NO: 1871 - DNA, 10 bp, Artificial Sequence
  Synthetic Sequence
gccacactcg

SEQ ID NO: 1872 - DNA, 10 bp, Artificial Sequence
  Synthetic Sequence
atagtcgccc

SEQ ID NO: 1873 - DNA, 10 bp, Artificial Sequence
  Synthetic Sequence
ttacctacca

SEQ ID NO: 1874 - DNA, 10 bp, Artificial Sequence
  Synthetic Sequence
ccacggtttg

SEQ ID NO: 1875 - DNA, 10 bp, Artificial Sequence
  Synthetic Sequence
taagttgaga

SEQ ID NO: 1876 - DNA, 10 bp, Artificial Sequence
  Synthetic Sequence
tcatccatag

SEQ ID NO: 1877 - DNA, 10 bp, Artificial Sequence
  Synthetic Sequence
gtgttgggac

SEQ ID NO: 1878 - DNA, 10 bp, Artificial Sequence
  Synthetic Sequence
caccttgggt

SEQ ID NO: 1879 - DNA, 10 bp, Artificial Sequence
  Synthetic Sequence
cgcagatagt

SEQ ID NO: 1880 - DNA, 10 bp, Artificial Sequence
  Synthetic Sequence
acaagttgtg

SEQ ID NO: 1881 - DNA, 10 bp, Artificial Sequence
  Synthetic Sequence
atgaatcctc

SEQ ID NO: 1882 - DNA, 10 bp, Artificial Sequence
  Synthetic Sequence
caaatgcggt

SEQ ID NO: 1883 - DNA, 10 bp, Artificial Sequence
  Synthetic Sequence
cactgccaac

SEQ ID NO: 1884 - DNA, 10 bp, Artificial Sequence
  Synthetic Sequence
cggctcatgt

SEQ ID NO: 1885 - DNA, 10 bp, Artificial Sequence
  Synthetic Sequence
cgacagcttt

SEQ ID NO: 1886 - DNA, 10 bp, Artificial Sequence
  Synthetic Sequence
accacgcgct

SEQ ID NO: 1887 - DNA, 10 bp, Artificial Sequence
  Synthetic Sequence
ctatttgcca

SEQ ID NO: 1888 - DNA, 10 bp, Artificial Sequence
  Synthetic Sequence
attgatgtta

SEQ ID NO: 1889 - DNA, 10 bp, Artificial Sequence
  Synthetic Sequence
actgatctag

SEQ ID NO: 1890 - DNA, 10 bp, Artificial Sequence
  Synthetic Sequence
ggccgtgtag

SEQ ID NO: 1891 - DNA, 10 bp, Artificial Sequence
  Synthetic Sequence
atgatgaacc

SEQ ID NO: 1892 - DNA, 10 bp, Artificial Sequence
  Synthetic Sequence
gtcgaaccgt

SEQ ID NO: 1893 - DNA, 10 bp, Artificial Sequence
  Synthetic Sequence
ttctgagttt

SEQ ID NO: 1894 - DNA, 10 bp, Artificial Sequence
  Synthetic Sequence
tagccaataa

SEQ ID NO: 1895 - DNA, 10 bp, Artificial Sequence
  Synthetic Sequence
cgcctctctg

SEQ ID NO: 1896 - DNA, 10 bp, Artificial Sequence
  Synthetic Sequence
gccgagaaga

SEQ ID NO: 1897 - DNA, 10 bp, Artificial Sequence
  Synthetic Sequence
atatgggcga

SEQ ID NO: 1898 - DNA, 10 bp, Artificial Sequence
  Synthetic Sequence
ctatggagta

SEQ ID NO: 1899 - DNA, 10 bp, Artificial Sequence
  Synthetic Sequence
aaaccgtaac

SEQ ID NO: 1900 - DNA, 10 bp, Artificial Sequence
  Synthetic Sequence
gggtatgttg

SEQ ID NO: 1901 - DNA, 10 bp, Artificial Sequence
  Synthetic Sequence
tatttacaaa

SEQ ID NO: 1902 - DNA, 10 bp, Artificial Sequence
  Synthetic Sequence
ccattgcggc

SEQ ID NO: 1903 - DNA, 10 bp, Artificial Sequence
  Synthetic Sequence
tcaagcgttt

SEQ ID NO: 1904 - DNA, 10 bp, Artificial Sequence
  Synthetic Sequence
accaatgttt

SEQ ID NO: 1905 - DNA, 10 bp, Artificial Sequence
  Synthetic Sequence
attcgcgcag

SEQ ID NO: 1906 - DNA, 10 bp, Artificial Sequence
  Synthetic Sequence
tgagattaac

SEQ ID NO: 1907 - DNA, 10 bp, Artificial Sequence
  Synthetic Sequence
agtcttaaat

SEQ ID NO: 1908 - DNA, 10 bp, Artificial Sequence
  Synthetic Sequence
tacggtttgc

SEQ ID NO: 1909 - DNA, 10 bp, Artificial Sequence
  Synthetic Sequence
ctcaaggagt

SEQ ID NO: 1910 - DNA, 10 bp, Artificial Sequence
  Synthetic Sequence
tctgattacc

SEQ ID NO: 1911 - DNA, 10 bp, Artificial Sequence
  Synthetic Sequence
agaacagaga

SEQ ID NO: 1912 - DNA, 10 bp, Artificial Sequence
  Synthetic Sequence
accatagatt

SEQ ID NO: 1913 - DNA, 10 bp, Artificial Sequence
  Synthetic Sequence
acatacagct

SEQ ID NO: 1914 - DNA, 10 bp, Artificial Sequence
  Synthetic Sequence
acccattacc

SEQ ID NO: 1915 - DNA, 10 bp, Artificial Sequence
  Synthetic Sequence
agccggctaa

SEQ ID NO: 1916 - DNA, 10 bp, Artificial Sequence
  Synthetic Sequence
accgaatcga

SEQ ID NO: 1917 - DNA, 10 bp, Artificial Sequence
  Synthetic Sequence
ctgtgaaatt

SEQ ID NO: 1918 - DNA, 10 bp, Artificial Sequence
  Synthetic Sequence
tctccggtat

SEQ ID NO: 1919 - DNA, 10 bp, Artificial Sequence
  Synthetic Sequence
tatgataggt

SEQ ID NO: 1920 - DNA, 10 bp, Artificial Sequence
  Synthetic Sequence
ccaaatcctt

SEQ ID NO: 1921 - DNA, 10 bp, Artificial Sequence
  Synthetic Sequence
taggccgtta

SEQ ID NO: 1922 - DNA, 10 bp, Artificial Sequence
  Synthetic Sequence
accgggactc

SEQ ID NO: 1923 - DNA, 10 bp, Artificial Sequence
  Synthetic Sequence
tgtactgccg

SEQ ID NO: 1924 - DNA, 10 bp, Artificial Sequence
  Synthetic Sequence
taagaatcac

SEQ ID NO: 1925 - DNA, 10 bp, Artificial Sequence
  Synthetic Sequence
taccatcgcg

SEQ ID NO: 1926 - DNA, 10 bp, Artificial Sequence
  Synthetic Sequence
tgtattgagg

SEQ ID NO: 1927 - DNA, 10 bp, Artificial Sequence
  Synthetic Sequence
acacgtctac

SEQ ID NO: 1928 - DNA, 10 bp, Artificial Sequence
  Synthetic Sequence
ttactgcttg

SEQ ID NO: 1929 - DNA, 10 bp, Artificial Sequence
  Synthetic Sequence
ttgaagagtg

SEQ ID NO: 1930 - DNA, 10 bp, Artificial Sequence
  Synthetic Sequence
gatcctattt

SEQ ID NO: 1931 - DNA, 10 bp, Artificial Sequence
  Synthetic Sequence
gcttgggcgt

SEQ ID NO: 1932 - DNA, 10 bp, Artificial Sequence
  Synthetic Sequence
gaataccctc

SEQ ID NO: 1933 - DNA, 10 bp, Artificial Sequence
  Synthetic Sequence
ggatggcttt

SEQ ID NO: 1934 - DNA, 10 bp, Artificial Sequence
  Synthetic Sequence
gaggtcctgt

SEQ ID NO: 1935 - DNA, 10 bp, Artificial Sequence
  Synthetic Sequence
gatcaagtcc

SEQ ID NO: 1936 - DNA, 10 bp, Artificial Sequence
  Synthetic Sequence
ttaggcaaac

SEQ ID NO: 1937 - DNA, 10 bp, Artificial Sequence
  Synthetic Sequence
agaaacttaa

SEQ ID NO: 1938 - DNA, 10 bp, Artificial Sequence
  Synthetic Sequence
cctaatcact

SEQ ID NO: 1939 - DNA, 10 bp, Artificial Sequence
  Synthetic Sequence
cggaaacggg

SEQ ID NO: 1940 - DNA, 10 bp, Artificial Sequence
  Synthetic Sequence
acaagtgcga

SEQ ID NO: 1941 - DNA, 10 bp, Artificial Sequence
  Synthetic Sequence
gagcgaaggg

SEQ ID NO: 1942 - DNA, 10 bp, Artificial Sequence
  Synthetic Sequence
aatgcaaagt

SEQ ID NO: 1943 - DNA, 10 bp, Artificial Sequence
  Synthetic Sequence
cttctccttg

SEQ ID NO: 1944 - DNA, 10 bp, Artificial Sequence
  Synthetic Sequence
attaagttat

SEQ ID NO: 1945 - DNA, 10 bp, Artificial Sequence
  Synthetic Sequence
aagataaggt

SEQ ID NO: 1946 - DNA, 10 bp, Artificial Sequence
  Synthetic Sequence
gccctgatat

SEQ ID NO: 1947 - DNA, 10 bp, Artificial Sequence
  Synthetic Sequence
ttctacacag

SEQ ID NO: 1948 - DNA, 10 bp, Artificial Sequence
  Synthetic Sequence
agcgtattag

SEQ ID NO: 1949 - DNA, 10 bp, Artificial Sequence
  Synthetic Sequence
ctttgacatc

SEQ ID NO: 1950 - DNA, 10 bp, Artificial Sequence
  Synthetic Sequence
taacactggc

SEQ ID NO: 1951 - DNA, 10 bp, Artificial Sequence
  Synthetic Sequence
gcttgggaca

SEQ ID NO: 1952 - DNA, 10 bp, Artificial Sequence
  Synthetic Sequence
aaggatgttg

SEQ ID NO: 1953 - DNA, 10 bp, Artificial Sequence
  Synthetic Sequence
ggcttaagcg

SEQ ID NO: 1954 - DNA, 10 bp, Artificial Sequence
  Synthetic Sequence
tgtcacaact

SEQ ID NO: 1955 - DNA, 10 bp, Artificial Sequence
  Synthetic Sequence
tcaataacta

SEQ ID NO: 1956 - DNA, 10 bp, Artificial Sequence
  Synthetic Sequence
catgagcact

SEQ ID NO: 1957 - DNA, 10 bp, Artificial Sequence
  Synthetic Sequence
atgcagggac

SEQ ID NO: 1958 - DNA, 10 bp, Artificial Sequence
  Synthetic Sequence
tgcaatcgga

SEQ ID NO: 1959 - DNA, 10 bp, Artificial Sequence
  Synthetic Sequence
tccggactcc

SEQ ID NO: 1960 - DNA, 10 bp, Artificial Sequence
  Synthetic Sequence
ccttaccgaa

SEQ ID NO: 1961 - DNA, 10 bp, Artificial Sequence
  Synthetic Sequence
gataaatcat

SEQ ID NO: 1962 - DNA, 10 bp, Artificial Sequence
  Synthetic Sequence
tcggtactat

SEQ ID NO: 1963 - DNA, 10 bp, Artificial Sequence
  Synthetic Sequence
attaatagct

SEQ ID NO: 1964 - DNA, 10 bp, Artificial Sequence
  Synthetic Sequence
tatttaagca

SEQ ID NO: 1965 - DNA, 10 bp, Artificial Sequence
  Synthetic Sequence
aagggattaa

SEQ ID NO: 1966 - DNA, 10 bp, Artificial Sequence
  Synthetic Sequence
gggtcacaag

SEQ ID NO: 1967 - DNA, 10 bp, Artificial Sequence
  Synthetic Sequence
tgtctgggct

SEQ ID NO: 1968 - DNA, 10 bp, Artificial Sequence
  Synthetic Sequence
tccctgtgct

SEQ ID NO: 1969 - DNA, 10 bp, Artificial Sequence
  Synthetic Sequence
gcgcctatat

SEQ ID NO: 1970 - DNA, 10 bp, Artificial Sequence
  Synthetic Sequence
tggcgcatgg

SEQ ID NO: 1971 - DNA, 10 bp, Artificial Sequence
  Synthetic Sequence
gtagtacacc

SEQ ID NO: 1972 - DNA, 10 bp, Artificial Sequence
  Synthetic Sequence
tcatagtggg

SEQ ID NO: 1973 - DNA, 10 bp, Artificial Sequence
  Synthetic Sequence
atgcgcggca

SEQ ID NO: 1974 - DNA, 10 bp, Artificial Sequence
  Synthetic Sequence
ctggatatgt

SEQ ID NO: 1975 - DNA, 10 bp, Artificial Sequence
  Synthetic Sequence
agatgattaa

SEQ ID NO: 1976 - DNA, 10 bp, Artificial Sequence
  Synthetic Sequence
gacgacggac

SEQ ID NO: 1977 - DNA, 10 bp, Artificial Sequence
  Synthetic Sequence
tttagagatt

SEQ ID NO: 1978 - DNA, 10 bp, Artificial Sequence
  Synthetic Sequence
cacgactgca

SEQ ID NO: 1979 - DNA, 10 bp, Artificial Sequence
  Synthetic Sequence
atttccttgc

SEQ ID NO: 1980 - DNA, 10 bp, Artificial Sequence
  Synthetic Sequence
ggcctcgtga

SEQ ID NO: 1981 - DNA, 10 bp, Artificial Sequence
  Synthetic Sequence
cctttctgat

SEQ ID NO: 1982 - DNA, 10 bp, Artificial Sequence
  Synthetic Sequence
aaatttcgtt

SEQ ID NO: 1983 - DNA, 10 bp, Artificial Sequence
  Synthetic Sequence
caagcgtcgc

SEQ ID NO: 1984 - DNA, 10 bp, Artificial Sequence
  Synthetic Sequence
ctaaggtcat

SEQ ID NO: 1985 - DNA, 10 bp, Artificial Sequence
  Synthetic Sequence
tatgtgtcac

SEQ ID NO: 1986 - DNA, 10 bp, Artificial Sequence
  Synthetic Sequence
acaggaaata

SEQ ID NO: 1987 - DNA, 10 bp, Artificial Sequence
  Synthetic Sequence
ttacctgcat

SEQ ID NO: 1988 - DNA, 10 bp, Artificial Sequence
  Synthetic Sequence
acggtgttcg

SEQ ID NO: 1989 - DNA, 10 bp, Artificial Sequence
  Synthetic Sequence
tggaaaggat

SEQ ID NO: 1990 - DNA, 10 bp, Artificial Sequence
  Synthetic Sequence
ctacagccca

SEQ ID NO: 1991 - DNA, 10 bp, Artificial Sequence
  Synthetic Sequence
ctgtgatcct

SEQ ID NO: 1992 - DNA, 10 bp, Artificial Sequence
  Synthetic Sequence
aatccgggta

SEQ ID NO: 1993 - DNA, 10 bp, Artificial Sequence
  Synthetic Sequence
gggattgtgt

SEQ ID NO: 1994 - DNA, 10 bp, Artificial Sequence
  Synthetic Sequence
tactgagacc

SEQ ID NO: 1995 - DNA, 10 bp, Artificial Sequence
  Synthetic Sequence
ggagctattt

SEQ ID NO: 1996 - DNA, 10 bp, Artificial Sequence
  Synthetic Sequence
gccacgtacg

SEQ ID NO: 1997 - DNA, 10 bp, Artificial Sequence
  Synthetic Sequence
acgacaggca

SEQ ID NO: 1998 - DNA, 10 bp, Artificial Sequence
  Synthetic Sequence
tcacgcttcg

SEQ ID NO: 1999 - DNA, 10 bp, Artificial Sequence
  Synthetic Sequence
tgcatttaga

SEQ ID NO: 2000 - DNA, 10 bp, Artificial Sequence
  Synthetic Sequence
cgttgaactg

SEQ ID NO: 2001 - DNA, 10 bp, Artificial Sequence
  Synthetic Sequence
aactgcgtgc

SEQ ID NO: 2002 - DNA, 10 bp, Artificial Sequence
  Synthetic Sequence
ttcgcggttt

SEQ ID NO: 2003 - DNA, 10 bp, Artificial Sequence
  Synthetic Sequence
ggtggtgagc

SEQ ID NO: 2004 - DNA, 10 bp, Artificial Sequence
  Synthetic Sequence
gcttcgaata

SEQ ID NO: 2005 - DNA, 10 bp, Artificial Sequence
  Synthetic Sequence
tgcgctacac

SEQ ID NO: 2006 - DNA, 10 bp, Artificial Sequence
  Synthetic Sequence
aacatggtaa

SEQ ID NO: 2007 - DNA, 10 bp, Artificial Sequence
  Synthetic Sequence
ttgatccctc

SEQ ID NO: 2008 - DNA, 10 bp, Artificial Sequence
  Synthetic Sequence
cgccttagtg

SEQ ID NO: 2009 - DNA, 10 bp, Artificial Sequence
  Synthetic Sequence
gacagacgcc

SEQ ID NO: 2010 - DNA, 10 bp, Artificial Sequence
  Synthetic Sequence
cactctctcc

SEQ ID NO: 2011 - DNA, 10 bp, Artificial Sequence
  Synthetic Sequence
tattgatgtt

SEQ ID NO: 2012 - DNA, 10 bp, Artificial Sequence
  Synthetic Sequence
gcgcatggag

SEQ ID NO: 2013 - DNA, 10 bp, Artificial Sequence
  Synthetic Sequence
aacacataat

SEQ ID NO: 2014 - DNA, 10 bp, Artificial Sequence
  Synthetic Sequence
ataatctccg

SEQ ID NO: 2015 - DNA, 10 bp, Artificial Sequence
  Synthetic Sequence
tcaggtaaca

SEQ ID NO: 2016 - DNA, 10 bp, Artificial Sequence
  Synthetic Sequence
tgtggccaac

SEQ ID NO: 2017 - DNA, 10 bp, Artificial Sequence
  Synthetic Sequence
tgtgtcgaaa

SEQ ID NO: 2018 - DNA, 10 bp, Artificial Sequence
  Synthetic Sequence
gtaacaccat

SEQ ID NO: 2019 - DNA, 10 bp, Artificial Sequence
  Synthetic Sequence
caatcttcgg

SEQ ID NO: 2020 - DNA, 10 bp, Artificial Sequence
  Synthetic Sequence
atccagccgt

SEQ ID NO: 2021 - DNA, 10 bp, Artificial Sequence
  Synthetic Sequence
tgctctctga

SEQ ID NO: 2022 - DNA, 10 bp, Artificial Sequence
  Synthetic Sequence
accatgtccc

SEQ ID NO: 2023 - DNA, 10 bp, Artificial Sequence
  Synthetic Sequence
cttgcatccg

SEQ ID NO: 2024 - DNA, 10 bp, Artificial Sequence
  Synthetic Sequence
aagcaaccac

SEQ ID NO: 2025 - DNA, 10 bp, Artificial Sequence
  Synthetic Sequence
agaattaacg

SEQ ID NO: 2026 - DNA, 10 bp, Artificial Sequence
  Synthetic Sequence
ccgtactcgc

SEQ ID NO: 2027 - DNA, 10 bp, Artificial Sequence
  Synthetic Sequence
aacagtagaa

SEQ ID NO: 2028 - DNA, 10 bp, Artificial Sequence
  Synthetic Sequence
ccagttccta

SEQ ID NO: 2029 - DNA, 10 bp, Artificial Sequence
  Synthetic Sequence
ccttcataaa

SEQ ID NO: 2030 - DNA, 10 bp, Artificial Sequence
  Synthetic Sequence
gtccaaggta

SEQ ID NO: 2031 - DNA, 10 bp, Artificial Sequence
  Synthetic Sequence
tgcgagctgt

SEQ ID NO: 2032 - DNA, 10 bp, Artificial Sequence
  Synthetic Sequence
cagattaatg

SEQ ID NO: 2033 - DNA, 10 bp, Artificial Sequence
  Synthetic Sequence
acctgaggtc

SEQ ID NO: 2034 - DNA, 10 bp, Artificial Sequence
  Synthetic Sequence
tctgtcactg

SEQ ID NO: 2035 - DNA, 10 bp, Artificial Sequence
  Synthetic Sequence
taaggcttaa

SEQ ID NO: 2036 - DNA, 10 bp, Artificial Sequence
  Synthetic Sequence
gacttggttt

SEQ ID NO: 2037 - DNA, 10 bp, Artificial Sequence
  Synthetic Sequence
gtttctggag

SEQ ID NO: 2038 - DNA, 10 bp, Artificial Sequence
  Synthetic Sequence
gcgataagcc

SEQ ID NO: 2039 - DNA, 10 bp, Artificial Sequence
  Synthetic Sequence
ctgctgtatc

SEQ ID NO: 2040 - DNA, 10 bp, Artificial Sequence
  Synthetic Sequence
actgtgtgac

SEQ ID NO: 2041 - DNA, 10 bp, Artificial Sequence
  Synthetic Sequence
tgggtgtata

SEQ ID NO: 2042 - DNA, 10 bp, Artificial Sequence
  Synthetic Sequence
gactgcatga

SEQ ID NO: 2043 - DNA, 10 bp, Artificial Sequence
  Synthetic Sequence
ttacgagagc

SEQ ID NO: 2044 - DNA, 10 bp, Artificial Sequence
  Synthetic Sequence
cgatgcatgt

SEQ ID NO: 2045 - DNA, 10 bp, Artificial Sequence
  Synthetic Sequence
tcgcgtgatc

SEQ ID NO: 2046 - DNA, 10 bp, Artificial Sequence
  Synthetic Sequence
ggtgctcatc

SEQ ID NO: 2047 - DNA, 10 bp, Artificial Sequence
  Synthetic Sequence
tccgcaacta

SEQ ID NO: 2048 - DNA, 10 bp, Artificial Sequence
  Synthetic Sequence
agtgagccct

SEQ ID NO: 2049 - DNA, 10 bp, Artificial Sequence
  Synthetic Sequence
cgcggacaac

SEQ ID NO: 2050 - DNA, 10 bp, Artificial Sequence
  Synthetic Sequence
ccttcaagtc

SEQ ID NO: 2051 - DNA, 10 bp, Artificial Sequence
  Synthetic Sequence
gcgtctatgg

SEQ ID NO: 2052 - DNA, 10 bp, Artificial Sequence
  Synthetic Sequence
acatagctta

SEQ ID NO: 2053 - DNA, 10 bp, Artificial Sequence
  Synthetic Sequence
taacctctgt

SEQ ID NO: 2054 - DNA, 10 bp, Artificial Sequence
  Synthetic Sequence
tgctagagtc

SEQ ID NO: 2055 - DNA, 10 bp, Artificial Sequence
  Synthetic Sequence
taccacgtct

SEQ ID NO: 2056 - DNA, 10 bp, Artificial Sequence
  Synthetic Sequence
tcattctctg

SEQ ID NO: 2057 - DNA, 10 bp, Artificial Sequence
  Synthetic Sequence
cgagtgttat

SEQ ID NO: 2058 - DNA, 10 bp, Artificial Sequence
  Synthetic Sequence
cttccgctta

SEQ ID NO: 2059 - DNA, 10 bp, Artificial Sequence
  Synthetic Sequence
ctgggacttt

SEQ ID NO: 2060 - DNA, 10 bp, Artificial Sequence
  Synthetic Sequence
aagtggtcct

SEQ ID NO: 2061 - DNA, 10 bp, Artificial Sequence
  Synthetic Sequence
ttagtagagt

SEQ ID NO: 2062 - DNA, 10 bp, Artificial Sequence
  Synthetic Sequence
tcttccgctc

SEQ ID NO: 2063 - DNA, 10 bp, Artificial Sequence
  Synthetic Sequence
tgacggttat

SEQ ID NO: 2064 - DNA, 10 bp, Artificial Sequence
  Synthetic Sequence
cgcgatagtt

SEQ ID NO: 2065 - DNA, 10 bp, Artificial Sequence
  Synthetic Sequence
tcagcacgag

SEQ ID NO: 2066 - DNA, 10 bp, Artificial Sequence
  Synthetic Sequence
tcagcgctca

SEQ ID NO: 2067 - DNA, 10 bp, Artificial Sequence
  Synthetic Sequence
gcgggtgaga

SEQ ID NO: 2068 - DNA, 10 bp, Artificial Sequence
  Synthetic Sequence
actggcgctt

SEQ ID NO: 2069 - DNA, 10 bp, Artificial Sequence
  Synthetic Sequence
tcaggacgca

SEQ ID NO: 2070 - DNA, 10 bp, Artificial Sequence
  Synthetic Sequence
aatacccgtg

SEQ ID NO: 2071 - DNA, 10 bp, Artificial Sequence
  Synthetic Sequence
agcatttgtt

SEQ ID NO: 2072 - DNA, 10 bp, Artificial Sequence
  Synthetic Sequence
tcgcataagt

SEQ ID NO: 2073 - DNA, 10 bp, Artificial Sequence
  Synthetic Sequence
atcatcacct

SEQ ID NO: 2074 - DNA, 10 bp, Artificial Sequence
  Synthetic Sequence
tgattgcagg

SEQ ID NO: 2075 - DNA, 10 bp, Artificial Sequence
  Synthetic Sequence
cctctgcaag

SEQ ID NO: 2076 - DNA, 10 bp, Artificial Sequence
  Synthetic Sequence
acctgggagg

SEQ ID NO: 2077 - DNA, 10 bp, Artificial Sequence
  Synthetic Sequence
caggtagccg

SEQ ID NO: 2078 - DNA, 10 bp, Artificial Sequence
  Synthetic Sequence
ccgactgttt

SEQ ID NO: 2079 - DNA, 10 bp, Artificial Sequence
  Synthetic Sequence
cgtactactg

SEQ ID NO: 2080 - DNA, 10 bp, Artificial Sequence
  Synthetic Sequence
gtggttgttg

SEQ ID NO: 2081 - DNA, 10 bp, Artificial Sequence
  Synthetic Sequence
atcgttggcg

SEQ ID NO: 2082 - DNA, 10 bp, Artificial Sequence
  Synthetic Sequence
ggtccacctc

SEQ ID NO: 2083 - DNA, 10 bp, Artificial Sequence
  Synthetic Sequence
gcgtagacga

SEQ ID NO: 2084 - DNA, 10 bp, Artificial Sequence
  Synthetic Sequence
cccttaccta

SEQ ID NO: 2085 - DNA, 10 bp, Artificial Sequence
  Synthetic Sequence
atgcattaca

SEQ ID NO: 2086 - DNA, 10 bp, Artificial Sequence
  Synthetic Sequence
accggtcaaa

SEQ ID NO: 2087 - DNA, 10 bp, Artificial Sequence
  Synthetic Sequence
cgtctgcact

SEQ ID NO: 2088 - DNA, 10 bp, Artificial Sequence
  Synthetic Sequence
gaccgcgaag

SEQ ID NO: 2089 - DNA, 10 bp, Artificial Sequence
  Synthetic Sequence
gaaccaaaca

SEQ ID NO: 2090 - DNA, 10 bp, Artificial Sequence
  Synthetic Sequence
cgatctggca

SEQ ID NO: 2091 - DNA, 10 bp, Artificial Sequence
  Synthetic Sequence
aggtatctat

SEQ ID NO: 2092 - DNA, 10 bp, Artificial Sequence
  Synthetic Sequence
atgagccatc

SEQ ID NO: 2093 - DNA, 10 bp, Artificial Sequence
  Synthetic Sequence
aaatcgtcat

SEQ ID NO: 2094 - DNA, 10 bp, Artificial Sequence
  Synthetic Sequence
ctgacgtaag

SEQ ID NO: 2095 - DNA, 10 bp, Artificial Sequence
  Synthetic Sequence
cgtcgggttg

SEQ ID NO: 2096 - DNA, 10 bp, Artificial Sequence
  Synthetic Sequence
attaggccct

SEQ ID NO: 2097 - DNA, 10 bp, Artificial Sequence
  Synthetic Sequence
aaacccaaat

SEQ ID NO: 2098 - DNA, 10 bp, Artificial Sequence
  Synthetic Sequence
cattacgcga

SEQ ID NO: 2099 - DNA, 10 bp, Artificial Sequence
  Synthetic Sequence
ggcacgattc

SEQ ID NO: 2100 - DNA, 10 bp, Artificial Sequence
  Synthetic Sequence
atgctgtgcc

SEQ ID NO: 2101 - DNA, 10 bp, Artificial Sequence
  Synthetic Sequence
attgtcctat

SEQ ID NO: 2102 - DNA, 10 bp, Artificial Sequence
  Synthetic Sequence
ggcgtgacaa

SEQ ID NO: 2103 - DNA, 10 bp, Artificial Sequence
  Synthetic Sequence
cgggttactg

SEQ ID NO: 2104 - DNA, 10 bp, Artificial Sequence
  Synthetic Sequence
gaaagttggg

SEQ ID NO: 2105 - DNA, 10 bp, Artificial Sequence
  Synthetic Sequence
acgtcgaaag

SEQ ID NO: 2106 - DNA, 10 bp, Artificial Sequence
  Synthetic Sequence
ttaatccacg

SEQ ID NO: 2107 - DNA, 10 bp, Artificial Sequence
  Synthetic Sequence
caagtctcga

SEQ ID NO: 2108 - DNA, 10 bp, Artificial Sequence
  Synthetic Sequence
gaacttctga

SEQ ID NO: 2109 - DNA, 10 bp, Artificial Sequence
  Synthetic Sequence
tttcagtaaa

SEQ ID NO: 2110 - DNA, 10 bp, Artificial Sequence
  Synthetic Sequence
gagcgatgtc

SEQ ID NO: 2111 - DNA, 10 bp, Artificial Sequence
  Synthetic Sequence
ctaactggcg

SEQ ID NO: 2112 - DNA, 10 bp, Artificial Sequence
  Synthetic Sequence
ccttcgggct

SEQ ID NO: 2113 - DNA, 10 bp, Artificial Sequence
  Synthetic Sequence
tcctttaggc

SEQ ID NO: 2114 - DNA, 10 bp, Artificial Sequence
  Synthetic Sequence
actcattgaa

SEQ ID NO: 2115 - DNA, 10 bp, Artificial Sequence
  Synthetic Sequence
acggctagcc

SEQ ID NO: 2116 - DNA, 10 bp, Artificial Sequence
  Synthetic Sequence
gtaggtccgg

SEQ ID NO: 2117 - DNA, 10 bp, Artificial Sequence
  Synthetic Sequence
ttgtcgagca

SEQ ID NO: 2118 - DNA, 10 bp, Artificial Sequence
  Synthetic Sequence
aaagtgtgtt

SEQ ID NO: 2119 - DNA, 10 bp, Artificial Sequence
  Synthetic Sequence
agttggcgcc

SEQ ID NO: 2120 - DNA, 10 bp, Artificial Sequence
  Synthetic Sequence
cccgataagg

SEQ ID NO: 2121 - DNA, 10 bp, Artificial Sequence
  Synthetic Sequence
gataataggg

SEQ ID NO: 2122 - DNA, 10 bp, Artificial Sequence
  Synthetic Sequence
gagaagcatg

SEQ ID NO: 2123 - DNA, 10 bp, Artificial Sequence
  Synthetic Sequence
gaaatatgac

SEQ ID NO: 2124 - DNA, 10 bp, Artificial Sequence
  Synthetic Sequence
actggagtac

SEQ ID NO: 2125 - DNA, 10 bp, Artificial Sequence
  Synthetic Sequence
ttcctcactc

SEQ ID NO: 2126 - DNA, 10 bp, Artificial Sequence
  Synthetic Sequence
cccacgtatc

SEQ ID NO: 2127 - DNA, 10 bp, Artificial Sequence
  Synthetic Sequence
gaagtttgag

SEQ ID NO: 2128 - DNA, 10 bp, Artificial Sequence
  Synthetic Sequence
cactgtccat

SEQ ID NO: 2129 - DNA, 10 bp, Artificial Sequence
  Synthetic Sequence
agtttaacgg

SEQ ID NO: 2130 - DNA, 10 bp, Artificial Sequence
  Synthetic Sequence
aggtcaatag

SEQ ID NO: 2131 - DNA, 10 bp, Artificial Sequence
  Synthetic Sequence
gcacaatctc

SEQ ID NO: 2132 - DNA, 10 bp, Artificial Sequence
  Synthetic Sequence
gcccgggtaa

SEQ ID NO: 2133 - DNA, 10 bp, Artificial Sequence
  Synthetic Sequence
ttctgccgga

SEQ ID NO: 2134 - DNA, 10 bp, Artificial Sequence
  Synthetic Sequence
ctgcctgaat

SEQ ID NO: 2135 - DNA, 10 bp, Artificial Sequence
  Synthetic Sequence
ttacccggtc

SEQ ID NO: 2136 - DNA, 10 bp, Artificial Sequence
  Synthetic Sequence
tttcatgcac

SEQ ID NO: 2137 - DNA, 10 bp, Artificial Sequence
  Synthetic Sequence
gcgggcaaag

SEQ ID NO: 2138 - DNA, 10 bp, Artificial Sequence
  Synthetic Sequence
agctcgatat

SEQ ID NO: 2139 - DNA, 10 bp, Artificial Sequence
  Synthetic Sequence
accatcggag

SEQ ID NO: 2140 - DNA, 10 bp, Artificial Sequence
  Synthetic Sequence
agattcaatt

SEQ ID NO: 2141 - DNA, 10 bp, Artificial Sequence
  Synthetic Sequence
tgcccgtgtc

SEQ ID NO: 2142 - DNA, 10 bp, Artificial Sequence
  Synthetic Sequence
gacacagcta

SEQ ID NO: 2143 - DNA, 10 bp, Artificial Sequence
  Synthetic Sequence
gtgtcgctca

SEQ ID NO: 2144 - DNA, 10 bp, Artificial Sequence
  Synthetic Sequence
gttcgacgct

SEQ ID NO: 2145 - DNA, 10 bp, Artificial Sequence
  Synthetic Sequence
catcggctcg

SEQ ID NO: 2146 - DNA, 10 bp, Artificial Sequence
  Synthetic Sequence
tgaaccagct

SEQ ID NO: 2147 - DNA, 10 bp, Artificial Sequence
  Synthetic Sequence
acgagacccg

SEQ ID NO: 2148 - DNA, 10 bp, Artificial Sequence
  Synthetic Sequence
gatccgctga

SEQ ID NO: 2149 - DNA, 10 bp, Artificial Sequence
  Synthetic Sequence
tttatttgta

SEQ ID NO: 2150 - DNA, 10 bp, Artificial Sequence
  Synthetic Sequence
taggatacca

SEQ ID NO: 2151 - DNA, 10 bp, Artificial Sequence
  Synthetic Sequence
ggtcgctcgt

SEQ ID NO: 2152 - DNA, 10 bp, Artificial Sequence
  Synthetic Sequence
cctattaagt

SEQ ID NO: 2153 - DNA, 10 bp, Artificial Sequence
  Synthetic Sequence
attgttattg

SEQ ID NO: 2154 - DNA, 10 bp, Artificial Sequence
  Synthetic Sequence
ggtcagcggt

SEQ ID NO: 2155 - DNA, 10 bp, Artificial Sequence
  Synthetic Sequence
tgtgcactga

SEQ ID NO: 2156 - DNA, 10 bp, Artificial Sequence
  Synthetic Sequence
ccgcctcaac

SEQ ID NO: 2157 - DNA, 10 bp, Artificial Sequence
  Synthetic Sequence
tacaaacagt

SEQ ID NO: 2158 - DNA, 10 bp, Artificial Sequence
  Synthetic Sequence
tttaagccgt

SEQ ID NO: 2159 - DNA, 10 bp, Artificial Sequence
  Synthetic Sequence
cacgttatcc

SEQ ID NO: 2160 - DNA, 10 bp, Artificial Sequence
  Synthetic Sequence
gttaagacac

SEQ ID NO: 2161 - DNA, 10 bp, Artificial Sequence
  Synthetic Sequence
ttataggtcc

SEQ ID NO: 2162 - DNA, 10 bp, Artificial Sequence
  Synthetic Sequence
tacctacata

SEQ ID NO: 2163 - DNA, 10 bp, Artificial Sequence
  Synthetic Sequence
ctttctcctt

SEQ ID NO: 2164 - DNA, 10 bp, Artificial Sequence
  Synthetic Sequence
tactggagtg

SEQ ID NO: 2165 - DNA, 10 bp, Artificial Sequence
  Synthetic Sequence
atgggcactg

SEQ ID NO: 2166 - DNA, 10 bp, Artificial Sequence
  Synthetic Sequence
ctattctata

SEQ ID NO: 2167 - DNA, 10 bp, Artificial Sequence
  Synthetic Sequence
aaggtccttc

SEQ ID NO: 2168 - DNA, 10 bp, Artificial Sequence
  Synthetic Sequence
tggatattca

SEQ ID NO: 2169 - DNA, 10 bp, Artificial Sequence
  Synthetic Sequence
gaacacgcag

SEQ ID NO: 2170 - DNA, 10 bp, Artificial Sequence
  Synthetic Sequence
tgcttaggtg

SEQ ID NO: 2171 - DNA, 10 bp, Artificial Sequence
  Synthetic Sequence
cgcaatcacg

SEQ ID NO: 2172 - DNA, 10 bp, Artificial Sequence
  Synthetic Sequence
agtgaggaag

SEQ ID NO: 2173 - DNA, 10 bp, Artificial Sequence
  Synthetic Sequence
cggtcatccg

SEQ ID NO: 2174 - DNA, 10 bp, Artificial Sequence
  Synthetic Sequence
caactagtag

SEQ ID NO: 2175 - DNA, 10 bp, Artificial Sequence
  Synthetic Sequence
taccagtgta

SEQ ID NO: 2176 - DNA, 10 bp, Artificial Sequence
  Synthetic Sequence
ccttccgaat

SEQ ID NO: 2177 - DNA, 10 bp, Artificial Sequence
  Synthetic Sequence
ccagaagcgg

SEQ ID NO: 2178 - DNA, 10 bp, Artificial Sequence
  Synthetic Sequence
aactccacgc

SEQ ID NO: 2179 - DNA, 10 bp, Artificial Sequence
  Synthetic Sequence
gggtcgtgat

SEQ ID NO: 2180 - DNA, 10 bp, Artificial Sequence
  Synthetic Sequence
gtaccgcttc

SEQ ID NO: 2181 - DNA, 10 bp, Artificial Sequence
  Synthetic Sequence
cacgagcaac

SEQ ID NO: 2182 - DNA, 10 bp, Artificial Sequence
  Synthetic Sequence
aaggcggcaa

SEQ ID NO: 2183 - DNA, 10 bp, Artificial Sequence
  Synthetic Sequence
aatgtcgttg

SEQ ID NO: 2184 - DNA, 10 bp, Artificial Sequence
  Synthetic Sequence
ctgtcccgga

SEQ ID NO: 2185 - DNA, 10 bp, Artificial Sequence
  Synthetic Sequence
tcctcagtaa

SEQ ID NO: 2186 - DNA, 10 bp, Artificial Sequence
  Synthetic Sequence
gggtgaaact

SEQ ID NO: 2187 - DNA, 10 bp, Artificial Sequence
  Synthetic Sequence
attgtaggac

SEQ ID NO: 2188 - DNA, 10 bp, Artificial Sequence
  Synthetic Sequence
aaacggcgta

SEQ ID NO: 2189 - DNA, 10 bp, Artificial Sequence
  Synthetic Sequence
gtacattaag

SEQ ID NO: 2190 - DNA, 10 bp, Artificial Sequence
  Synthetic Sequence
gccacaagac

SEQ ID NO: 2191 - DNA, 10 bp, Artificial Sequence
  Synthetic Sequence
taagagctcc

SEQ ID NO: 2192 - DNA, 10 bp, Artificial Sequence
  Synthetic Sequence
taaacatgat

SEQ ID NO: 2193 - DNA, 10 bp, Artificial Sequence
  Synthetic Sequence
gaccagactc

SEQ ID NO: 2194 - DNA, 10 bp, Artificial Sequence
  Synthetic Sequence
agaagacaca

SEQ ID NO: 2195 - DNA, 10 bp, Artificial Sequence
  Synthetic Sequence
gcgatccaca

SEQ ID NO: 2196 - DNA, 10 bp, Artificial Sequence
  Synthetic Sequence
cgtccatgta

SEQ ID NO: 2197 - DNA, 10 bp, Artificial Sequence
  Synthetic Sequence
ccttcctccg

SEQ ID NO: 2198 - DNA, 10 bp, Artificial Sequence
  Synthetic Sequence
cggagattcg

SEQ ID NO: 2199 - DNA, 10 bp, Artificial Sequence
  Synthetic Sequence
aactcgagct

SEQ ID NO: 2200 - DNA, 10 bp, Artificial Sequence
  Synthetic Sequence
ataaatgtga

SEQ ID NO: 2201 - DNA, 10 bp, Artificial Sequence
  Synthetic Sequence
cagttcatga

SEQ ID NO: 2202 - DNA, 10 bp, Artificial Sequence
  Synthetic Sequence
acctcgactt

SEQ ID NO: 2203 - DNA, 10 bp, Artificial Sequence
  Synthetic Sequence
ccgattgagc

SEQ ID NO: 2204 - DNA, 10 bp, Artificial Sequence
  Synthetic Sequence
aataataata

SEQ ID NO: 2205 - DNA, 10 bp, Artificial Sequence
  Synthetic Sequence
aacgcgatag

SEQ ID NO: 2206 - DNA, 10 bp, Artificial Sequence
  Synthetic Sequence
gctttggtcc

SEQ ID NO: 2207 - DNA, 10 bp, Artificial Sequence
  Synthetic Sequence
ctttgcacgc

SEQ ID NO: 2208 - DNA, 10 bp, Artificial Sequence
  Synthetic Sequence
tacaggtaat

SEQ ID NO: 2209 - DNA, 10 bp, Artificial Sequence
  Synthetic Sequence
tgcagcctcc

SEQ ID NO: 2210 - DNA, 10 bp, Artificial Sequence
  Synthetic Sequence
aacggtgtat

SEQ ID NO: 2211 - DNA, 10 bp, Artificial Sequence
  Synthetic Sequence
gggttagtac

SEQ ID NO: 2212 - DNA, 10 bp, Artificial Sequence
  Synthetic Sequence
aagaacaact

SEQ ID NO: 2213 - DNA, 10 bp, Artificial Sequence
  Synthetic Sequence
caggcgttct

SEQ ID NO: 2214 - DNA, 10 bp, Artificial Sequence
  Synthetic Sequence
gatggaatgg

SEQ ID NO: 2215 - DNA, 10 bp, Artificial Sequence
  Synthetic Sequence
gtgtgcgctt

SEQ ID NO: 2216 - DNA, 10 bp, Artificial Sequence
  Synthetic Sequence
cctcttctac

SEQ ID NO: 2217 - DNA, 10 bp, Artificial Sequence
  Synthetic Sequence
atgcacgagc

SEQ ID NO: 2218 - DNA, 10 bp, Artificial Sequence
  Synthetic Sequence
aggagaacag

SEQ ID NO: 2219 - DNA, 10 bp, Artificial Sequence
  Synthetic Sequence
agatccgcgg

SEQ ID NO: 2220 - DNA, 10 bp, Artificial Sequence
  Synthetic Sequence
ggttaagaga

SEQ ID NO: 2221 - DNA, 10 bp, Artificial Sequence
  Synthetic Sequence
ctctcgactc

SEQ ID NO: 2222 - DNA, 10 bp, Artificial Sequence
  Synthetic Sequence
atttgtaggg

SEQ ID NO: 2223 - DNA, 10 bp, Artificial Sequence
  Synthetic Sequence
tcccaagttc

SEQ ID NO: 2224 - DNA, 10 bp, Artificial Sequence
  Synthetic Sequence
ccgataacag

SEQ ID NO: 2225 - DNA, 10 bp, Artificial Sequence
  Synthetic Sequence
catggcagcc

SEQ ID NO: 2226 - DNA, 10 bp, Artificial Sequence
  Synthetic Sequence
agcatgacta

SEQ ID NO: 2227 - DNA, 10 bp, Artificial Sequence
  Synthetic Sequence
ctctcatacg

SEQ ID NO: 2228 - DNA, 10 bp, Artificial Sequence
  Synthetic Sequence
aatgccgctc

SEQ ID NO: 2229 - DNA, 10 bp, Artificial Sequence
  Synthetic Sequence
ggcgttgtcc

SEQ ID NO: 2230 - DNA, 10 bp, Artificial Sequence
  Synthetic Sequence
agggacttgc

SEQ ID NO: 2231 - DNA, 10 bp, Artificial Sequence
  Synthetic Sequence
cgctgcctaa

SEQ ID NO: 2232 - DNA, 10 bp, Artificial Sequence
  Synthetic Sequence
tggaggtgtg

SEQ ID NO: 2233 - DNA, 10 bp, Artificial Sequence
  Synthetic Sequence
ccaatggagg

SEQ ID NO: 2234 - DNA, 10 bp, Artificial Sequence
  Synthetic Sequence
tagacgtcgt

SEQ ID NO: 2235 - DNA, 10 bp, Artificial Sequence
  Synthetic Sequence
gatattccta

SEQ ID NO: 2236 - DNA, 10 bp, Artificial Sequence
  Synthetic Sequence
agtccctaag

SEQ ID NO: 2237 - DNA, 10 bp, Artificial Sequence
  Synthetic Sequence
gattggccct

SEQ ID NO: 2238 - DNA, 10 bp, Artificial Sequence
  Synthetic Sequence
ttactgtcgc

SEQ ID NO: 2239 - DNA, 10 bp, Artificial Sequence
  Synthetic Sequence
cacaggtggg

SEQ ID NO: 2240 - DNA, 10 bp, Artificial Sequence
  Synthetic Sequence
ggactataca

SEQ ID NO: 2241 - DNA, 10 bp, Artificial Sequence
  Synthetic Sequence
cactacaagg

SEQ ID NO: 2242 - DNA, 10 bp, Artificial Sequence
  Synthetic Sequence
atcatcctaa

SEQ ID NO: 2243 - DNA, 10 bp, Artificial Sequence
  Synthetic Sequence
tttacgagta

SEQ ID NO: 2244 - DNA, 10 bp, Artificial Sequence
  Synthetic Sequence
gacttgatgc

SEQ ID NO: 2245 - DNA, 10 bp, Artificial Sequence
  Synthetic Sequence
agcttctttc

SEQ ID NO: 2246 - DNA, 10 bp, Artificial Sequence
  Synthetic Sequence
taacctttcc

SEQ ID NO: 2247 - DNA, 10 bp, Artificial Sequence
  Synthetic Sequence
attctacatc

SEQ ID NO: 2248 - DNA, 10 bp, Artificial Sequence
  Synthetic Sequence
ggcatcatca

SEQ ID NO: 2249 - DNA, 10 bp, Artificial Sequence
  Synthetic Sequence
gatgtctgtt

SEQ ID NO: 2250 - DNA, 10 bp, Artificial Sequence
  Synthetic Sequence
ctttgtttcc

SEQ ID NO: 2251 - DNA, 10 bp, Artificial Sequence
  Synthetic Sequence
aaatgttgac

SEQ ID NO: 2252 - DNA, 10 bp, Artificial Sequence
  Synthetic Sequence
ggtggatacg

SEQ ID NO: 2253 - DNA, 10 bp, Artificial Sequence
  Synthetic Sequence
ttatgcggta

SEQ ID NO: 2254 - DNA, 10 bp, Artificial Sequence
  Synthetic Sequence
aatgaaccga

SEQ ID NO: 2255 - DNA, 10 bp, Artificial Sequence
  Synthetic Sequence
ggaacctccg

SEQ ID NO: 2256 - DNA, 10 bp, Artificial Sequence
  Synthetic Sequence
ttcctggtag

SEQ ID NO: 2257 - DNA, 10 bp, Artificial Sequence
  Synthetic Sequence
acagacgcga

SEQ ID NO: 2258 - DNA, 10 bp, Artificial Sequence
  Synthetic Sequence
tatcctcgta

SEQ ID NO: 2259 - DNA, 10 bp, Artificial Sequence
  Synthetic Sequence
tctaagaaga

SEQ ID NO: 2260 - DNA, 10 bp, Artificial Sequence
  Synthetic Sequence
atgacaattc

SEQ ID NO: 2261 - DNA, 10 bp, Artificial Sequence
  Synthetic Sequence
taatcagagt

SEQ ID NO: 2262 - DNA, 10 bp, Artificial Sequence
  Synthetic Sequence
cttcccgcaa

SEQ ID NO: 2263 - DNA, 10 bp, Artificial Sequence
  Synthetic Sequence
ggagcagcaa

SEQ ID NO: 2264 - DNA, 10 bp, Artificial Sequence
  Synthetic Sequence
tagaagattc

SEQ ID NO: 2265 - DNA, 10 bp, Artificial Sequence
  Synthetic Sequence
gcgcgtttgc

SEQ ID NO: 2266 - DNA, 10 bp, Artificial Sequence
  Synthetic Sequence
aacggacacc

SEQ ID NO: 2267 - DNA, 10 bp, Artificial Sequence
  Synthetic Sequence
atcctgatgc

SEQ ID NO: 2268 - DNA, 10 bp, Artificial Sequence
  Synthetic Sequence
gtggttgaat

SEQ ID NO: 2269 - DNA, 10 bp, Artificial Sequence
  Synthetic Sequence
atgtaactcg

SEQ ID NO: 2270 - DNA, 10 bp, Artificial Sequence
  Synthetic Sequence
tgcactccca

SEQ ID NO: 2271 - DNA, 10 bp, Artificial Sequence
  Synthetic Sequence
caccataccg

SEQ ID NO: 2272 - DNA, 10 bp, Artificial Sequence
  Synthetic Sequence
gtccggtgca

SEQ ID NO: 2273 - DNA, 10 bp, Artificial Sequence
  Synthetic Sequence
ccaaacctgg

SEQ ID NO: 2274 - DNA, 10 bp, Artificial Sequence
  Synthetic Sequence
tctggttgag

SEQ ID NO: 2275 - DNA, 10 bp, Artificial Sequence
  Synthetic Sequence
ccggtggtag

SEQ ID NO: 2276 - DNA, 10 bp, Artificial Sequence
  Synthetic Sequence
gcacccatct

SEQ ID NO: 2277 - DNA, 10 bp, Artificial Sequence
  Synthetic Sequence
agggatggct

SEQ ID NO: 2278 - DNA, 10 bp, Artificial Sequence
  Synthetic Sequence
catcaggcgc

SEQ ID NO: 2279 - DNA, 10 bp, Artificial Sequence
  Synthetic Sequence
ggtctggtac

SEQ ID NO: 2280 - DNA, 10 bp, Artificial Sequence
  Synthetic Sequence
gtaaccagta

SEQ ID NO: 2281 - DNA, 10 bp, Artificial Sequence
  Synthetic Sequence
catccattaa

SEQ ID NO: 2282 - DNA, 10 bp, Artificial Sequence
  Synthetic Sequence
acgaataggt

SEQ ID NO: 2283 - DNA, 10 bp, Artificial Sequence
  Synthetic Sequence
aatgcgttgc

SEQ ID NO: 2284 - DNA, 10 bp, Artificial Sequence
  Synthetic Sequence
cctaagtttg

SEQ ID NO: 2285 - DNA, 10 bp, Artificial Sequence
  Synthetic Sequence
gtcacaggtt

SEQ ID NO: 2286 - DNA, 10 bp, Artificial Sequence
  Synthetic Sequence
atgaagggcg

SEQ ID NO: 2287 - DNA, 10 bp, Artificial Sequence
  Synthetic Sequence
ccaatatgca

SEQ ID NO: 2288 - DNA, 10 bp, Artificial Sequence
  Synthetic Sequence
aaccagaggc

SEQ ID NO: 2289 - DNA, 10 bp, Artificial Sequence
  Synthetic Sequence
gctgattcgc

SEQ ID NO: 2290 - DNA, 10 bp, Artificial Sequence
  Synthetic Sequence
tctcgctaca

SEQ ID NO: 2291 - DNA, 10 bp, Artificial Sequence
  Synthetic Sequence
tagagacata

SEQ ID NO: 2292 - DNA, 10 bp, Artificial Sequence
  Synthetic Sequence
taagcagcct

SEQ ID NO: 2293 - DNA, 10 bp, Artificial Sequence
  Synthetic Sequence
gcattatacc

SEQ ID NO: 2294 - DNA, 10 bp, Artificial Sequence
  Synthetic Sequence
gggatatcga

SEQ ID NO: 2295 - DNA, 10 bp, Artificial Sequence
  Synthetic Sequence
cgtcacatgg

SEQ ID NO: 2296 - DNA, 10 bp, Artificial Sequence
  Synthetic Sequence
gccttcgcct

SEQ ID NO: 2297 - DNA, 10 bp, Artificial Sequence
  Synthetic Sequence
caaacctact

SEQ ID NO: 2298 - DNA, 10 bp, Artificial Sequence
  Synthetic Sequence
aacactcaaa

SEQ ID NO: 2299 - DNA, 10 bp, Artificial Sequence
  Synthetic Sequence
agagcgtgcc

SEQ ID NO: 2300 - DNA, 10 bp, Artificial Sequence
  Synthetic Sequence
ctcgaaggat

SEQ ID NO: 2301 - DNA, 10 bp, Artificial Sequence
  Synthetic Sequence
atctatcatg

SEQ ID NO: 2302 - DNA, 10 bp, Artificial Sequence
  Synthetic Sequence
cgatatgacc

SEQ ID NO: 2303 - DNA, 10 bp, Artificial Sequence
  Synthetic Sequence
tggtgcgctc

SEQ ID NO: 2304 - DNA, 10 bp, Artificial Sequence
  Synthetic Sequence
tcttgcaccg

SEQ ID NO: 2305 - DNA, 10 bp, Artificial Sequence
  Synthetic Sequence
caacaatgtt

SEQ ID NO: 2306 - DNA, 10 bp, Artificial Sequence
  Synthetic Sequence
ctatgatcaa

SEQ ID NO: 2307 - DNA, 10 bp, Artificial Sequence
  Synthetic Sequence
gttcgaatcc

SEQ ID NO: 2308 - DNA, 10 bp, Artificial Sequence
  Synthetic Sequence
cctgactaac

SEQ ID NO: 2309 - DNA, 10 bp, Artificial Sequence
  Synthetic Sequence
gttctacaca

SEQ ID NO: 2310 - DNA, 10 bp, Artificial Sequence
  Synthetic Sequence
caaggtgcat

SEQ ID NO: 2311 - DNA, 10 bp, Artificial Sequence
  Synthetic Sequence
tggctttcta

SEQ ID NO: 2312 - DNA, 10 bp, Artificial Sequence
  Synthetic Sequence
ggccgcaaat

SEQ ID NO: 2313 - DNA, 10 bp, Artificial Sequence
  Synthetic Sequence
gtgcacacag

SEQ ID NO: 2314 - DNA, 10 bp, Artificial Sequence
  Synthetic Sequence
tcaagctctc

SEQ ID NO: 2315 - DNA, 10 bp, Artificial Sequence
  Synthetic Sequence
gaatccgatg

SEQ ID NO: 2316 - DNA, 10 bp, Artificial Sequence
  Synthetic Sequence
tcacttctat

SEQ ID NO: 2317 - DNA, 10 bp, Artificial Sequence
  Synthetic Sequence
cagcgggaaa

SEQ ID NO: 2318 - DNA, 10 bp, Artificial Sequence
  Synthetic Sequence
acgacgatta

SEQ ID NO: 2319 - DNA, 10 bp, Artificial Sequence
  Synthetic Sequence
atactatcga

SEQ ID NO: 2320 - DNA, 10 bp, Artificial Sequence
  Synthetic Sequence
agcgagactg

SEQ ID NO: 2321 - DNA, 10 bp, Artificial Sequence
  Synthetic Sequence
tcgtaacacg

SEQ ID NO: 2322 - DNA, 10 bp, Artificial Sequence
  Synthetic Sequence
gaaaccattc

SEQ ID NO: 2323 - DNA, 10 bp, Artificial Sequence
  Synthetic Sequence
cttcgtggac

SEQ ID NO: 2324 - DNA, 10 bp, Artificial Sequence
  Synthetic Sequence
gggaccctaa

SEQ ID NO: 2325 - DNA, 10 bp, Artificial Sequence
  Synthetic Sequence
ctgagggttc

SEQ ID NO: 2326 - DNA, 10 bp, Artificial Sequence
  Synthetic Sequence
taacgaggac

SEQ ID NO: 2327 - DNA, 10 bp, Artificial Sequence
  Synthetic Sequence
ctgggttggg

SEQ ID NO: 2328 - DNA, 10 bp, Artificial Sequence
  Synthetic Sequence
tagtagatcg

SEQ ID NO: 2329 - DNA, 10 bp, Artificial Sequence
  Synthetic Sequence
tagcgactct

SEQ ID NO: 2330 - DNA, 10 bp, Artificial Sequence
  Synthetic Sequence
gatcgctgag

SEQ ID NO: 2331 - DNA, 10 bp, Artificial Sequence
  Synthetic Sequence
cctaactcca

SEQ ID NO: 2332 - DNA, 10 bp, Artificial Sequence
  Synthetic Sequence
agctgaccgg

SEQ ID NO: 2333 - DNA, 10 bp, Artificial Sequence
  Synthetic Sequence
tctactacgt

SEQ ID NO: 2334 - DNA, 10 bp, Artificial Sequence
  Synthetic Sequence
caaatagccc

SEQ ID NO: 2335 - DNA, 10 bp, Artificial Sequence
  Synthetic Sequence
atgccgatcc

SEQ ID NO: 2336 - DNA, 10 bp, Artificial Sequence
  Synthetic Sequence
ctgactaggg

SEQ ID NO: 2337 - DNA, 10 bp, Artificial Sequence
  Synthetic Sequence
cgcagtacgc

SEQ ID NO: 2338 - DNA, 10 bp, Artificial Sequence
  Synthetic Sequence
tgaagctgga

SEQ ID NO: 2339 - DNA, 10 bp, Artificial Sequence
  Synthetic Sequence
ttataacaag

SEQ ID NO: 2340 - DNA, 10 bp, Artificial Sequence
  Synthetic Sequence
tatgcaccgc

SEQ ID NO: 2341 - DNA, 10 bp, Artificial Sequence
  Synthetic Sequence
ggtcctcagg

SEQ ID NO: 2342 - DNA, 10 bp, Artificial Sequence
  Synthetic Sequence
gtcaagacgg

SEQ ID NO: 2343 - DNA, 10 bp, Artificial Sequence
  Synthetic Sequence
gttagcagtg

SEQ ID NO: 2344 - DNA, 10 bp, Artificial Sequence
  Synthetic Sequence
tatatgacgg

SEQ ID NO: 2345 - DNA, 10 bp, Artificial Sequence
  Synthetic Sequence
caacgcgctc

SEQ ID NO: 2346 - DNA, 10 bp, Artificial Sequence
  Synthetic Sequence
aggcaatata

SEQ ID NO: 2347 - DNA, 10 bp, Artificial Sequence
  Synthetic Sequence
atgataacgg

SEQ ID NO: 2348 - DNA, 10 bp, Artificial Sequence
  Synthetic Sequence
ggcgctgata

SEQ ID NO: 2349 - DNA, 10 bp, Artificial Sequence
  Synthetic Sequence
ccacaacttc

SEQ ID NO: 2350 - DNA, 10 bp, Artificial Sequence
  Synthetic Sequence
gtgcccttat

SEQ ID NO: 2351 - DNA, 10 bp, Artificial Sequence
  Synthetic Sequence
atccaccgtc

SEQ ID NO: 2352 - DNA, 10 bp, Artificial Sequence
  Synthetic Sequence
tacgttaatc

SEQ ID NO: 2353 - DNA, 10 bp, Artificial Sequence
  Synthetic Sequence
tggacggtcg

SEQ ID NO: 2354 - DNA, 10 bp, Artificial Sequence
  Synthetic Sequence
aaatcctgca

SEQ ID NO: 2355 - DNA, 10 bp, Artificial Sequence
  Synthetic Sequence
cggaaggtcc

SEQ ID NO: 2356 - DNA, 10 bp, Artificial Sequence
  Synthetic Sequence
cgcagaatga

SEQ ID NO: 2357 - DNA, 10 bp, Artificial Sequence
  Synthetic Sequence
caatctcata

SEQ ID NO: 2358 - DNA, 10 bp, Artificial Sequence
  Synthetic Sequence
ttgtcgcccg

SEQ ID NO: 2359 - DNA, 10 bp, Artificial Sequence
  Synthetic Sequence
aacgggtgga

SEQ ID NO: 2360 - DNA, 10 bp, Artificial Sequence
  Synthetic Sequence
gcctctgaga

SEQ ID NO: 2361 - DNA, 10 bp, Artificial Sequence
  Synthetic Sequence
agacacacta

SEQ ID NO: 2362 - DNA, 10 bp, Artificial Sequence
  Synthetic Sequence
ttcggtccgt

SEQ ID NO: 2363 - DNA, 10 bp, Artificial Sequence
  Synthetic Sequence
taggtagttc

SEQ ID NO: 2364 - DNA, 10 bp, Artificial Sequence
  Synthetic Sequence
caagctcagc

SEQ ID NO: 2365 - DNA, 10 bp, Artificial Sequence
  Synthetic Sequence
tggcttcact

SEQ ID NO: 2366 - DNA, 10 bp, Artificial Sequence
  Synthetic Sequence
aaggaaactc

SEQ ID NO: 2367 - DNA, 10 bp, Artificial Sequence
  Synthetic Sequence
caaggtcgcc

SEQ ID NO: 2368 - DNA, 10 bp, Artificial Sequence
  Synthetic Sequence
actagctgat

SEQ ID NO: 2369 - DNA, 10 bp, Artificial Sequence
  Synthetic Sequence
ggatatccta

SEQ ID NO: 2370 - DNA, 10 bp, Artificial Sequence
  Synthetic Sequence
gaagcgtata

SEQ ID NO: 2371 - DNA, 10 bp, Artificial Sequence
  Synthetic Sequence
tccggcgtgt

SEQ ID NO: 2372 - DNA, 10 bp, Artificial Sequence
  Synthetic Sequence
aatgataacg

SEQ ID NO: 2373 - DNA, 10 bp, Artificial Sequence
  Synthetic Sequence
cattgactgt

SEQ ID NO: 2374 - DNA, 10 bp, Artificial Sequence
  Synthetic Sequence
gaattgcgac

SEQ ID NO: 2375 - DNA, 10 bp, Artificial Sequence
  Synthetic Sequence
tggtgtttag

SEQ ID NO: 2376 - DNA, 10 bp, Artificial Sequence
  Synthetic Sequence
atcaacggct

SEQ ID NO: 2377 - DNA, 10 bp, Artificial Sequence
  Synthetic Sequence
agatattgga

SEQ ID NO: 2378 - DNA, 10 bp, Artificial Sequence
  Synthetic Sequence
cctatccgta

SEQ ID NO: 2379 - DNA, 10 bp, Artificial Sequence
  Synthetic Sequence
ctttctataa

SEQ ID NO: 2380 - DNA, 10 bp, Artificial Sequence
  Synthetic Sequence
gtgccgtcta

SEQ ID NO: 2381 - DNA, 10 bp, Artificial Sequence
  Synthetic Sequence
tcactggtca

SEQ ID NO: 2382 - DNA, 10 bp, Artificial Sequence
  Synthetic Sequence
gtagccggtg

SEQ ID NO: 2383 - DNA, 10 bp, Artificial Sequence
  Synthetic Sequence
ggccagtcct

SEQ ID NO: 2384 - DNA, 10 bp, Artificial Sequence
  Synthetic Sequence
ctaacggcgc

SEQ ID NO: 2385 - DNA, 10 bp, Artificial Sequence
  Synthetic Sequence
tcccgcgtag

SEQ ID NO: 2386 - DNA, 10 bp, Artificial Sequence
  Synthetic Sequence
tatatccgcc

SEQ ID NO: 2387 - DNA, 10 bp, Artificial Sequence
  Synthetic Sequence
gtctccctaa

SEQ ID NO: 2388 - DNA, 10 bp, Artificial Sequence
  Synthetic Sequence
ttaactctta

SEQ ID NO: 2389 - DNA, 10 bp, Artificial Sequence
  Synthetic Sequence
tactggcttc

SEQ ID NO: 2390 - DNA, 10 bp, Artificial Sequence
  Synthetic Sequence
gcaaggaccg

SEQ ID NO: 2391 - DNA, 10 bp, Artificial Sequence
  Synthetic Sequence
gtcctcctac

SEQ ID NO: 2392 - DNA, 10 bp, Artificial Sequence
  Synthetic Sequence
cagcgttccg

SEQ ID NO: 2393 - DNA, 10 bp, Artificial Sequence
  Synthetic Sequence
ggcatctgag

SEQ ID NO: 2394 - DNA, 10 bp, Artificial Sequence
  Synthetic Sequence
gtatctactg

SEQ ID NO: 2395 - DNA, 10 bp, Artificial Sequence
  Synthetic Sequence
ggctggatac

SEQ ID NO: 2396 - DNA, 10 bp, Artificial Sequence
  Synthetic Sequence
ccgtggtata

SEQ ID NO: 2397 - DNA, 10 bp, Artificial Sequence
  Synthetic Sequence
aaggtcggtt

SEQ ID NO: 2398 - DNA, 10 bp, Artificial Sequence
  Synthetic Sequence
tgctcttaac

SEQ ID NO: 2399 - DNA, 10 bp, Artificial Sequence
  Synthetic Sequence
ccgctgatcc

SEQ ID NO: 2400 - DNA, 10 bp, Artificial Sequence
  Synthetic Sequence
cttaggcaat

SEQ ID NO: 2401 - DNA, 10 bp, Artificial Sequence
  Synthetic Sequence
tacgagatca

SEQ ID NO: 2402 - DNA, 10 bp, Artificial Sequence
  Synthetic Sequence
acaccctgta

SEQ ID NO: 2403 - DNA, 10 bp, Artificial Sequence
  Synthetic Sequence
cctgtggact

SEQ ID NO: 2404 - DNA, 10 bp, Artificial Sequence
  Synthetic Sequence
acgacttata

SEQ ID NO: 2405 - DNA, 10 bp, Artificial Sequence
  Synthetic Sequence
catattcgga

SEQ ID NO: 2406 - DNA, 10 bp, Artificial Sequence
  Synthetic Sequence
gatcatggcg

SEQ ID NO: 2407 - DNA, 10 bp, Artificial Sequence
  Synthetic Sequence
tagtcaagtt

SEQ ID NO: 2408 - DNA, 10 bp, Artificial Sequence
  Synthetic Sequence
acggttaacg

SEQ ID NO: 2409 - DNA, 10 bp, Artificial Sequence
  Synthetic Sequence
atgcttgaac

SEQ ID NO: 2410 - DNA, 10 bp, Artificial Sequence
  Synthetic Sequence
atttggtagg

SEQ ID NO: 2411 - DNA, 10 bp, Artificial Sequence
  Synthetic Sequence
aaattgaatc

SEQ ID NO: 2412 - DNA, 10 bp, Artificial Sequence
  Synthetic Sequence
gttgccaacc

SEQ ID NO: 2413 - DNA, 10 bp, Artificial Sequence
  Synthetic Sequence
actcctggat

SEQ ID NO: 2414 - DNA, 10 bp, Artificial Sequence
  Synthetic Sequence
cacataagcg

SEQ ID NO: 2415 - DNA, 10 bp, Artificial Sequence
  Synthetic Sequence
cttactagca

SEQ ID NO: 2416 - DNA, 10 bp, Artificial Sequence
  Synthetic Sequence
cgttccagca

SEQ ID NO: 2417 - DNA, 10 bp, Artificial Sequence
  Synthetic Sequence
tatgcagatt

SEQ ID NO: 2418 - DNA, 10 bp, Artificial Sequence
  Synthetic Sequence
ctgtttccgg

SEQ ID NO: 2419 - DNA, 10 bp, Artificial Sequence
  Synthetic Sequence
tgcacattgc

SEQ ID NO: 2420 - DNA, 10 bp, Artificial Sequence
  Synthetic Sequence
gctaggagag

SEQ ID NO: 2421 - DNA, 10 bp, Artificial Sequence
  Synthetic Sequence
tcagcctcca

SEQ ID NO: 2422 - DNA, 10 bp, Artificial Sequence
  Synthetic Sequence
accggctatc

SEQ ID NO: 2423 - DNA, 10 bp, Artificial Sequence
  Synthetic Sequence
ggccgttacg

SEQ ID NO: 2424 - DNA, 10 bp, Artificial Sequence
  Synthetic Sequence
tgcacgggag

SEQ ID NO: 2425 - DNA, 10 bp, Artificial Sequence
  Synthetic Sequence
agtagaaagt

SEQ ID NO: 2426 - DNA, 10 bp, Artificial Sequence
  Synthetic Sequence
atggcgtgca

SEQ ID NO: 2427 - DNA, 10 bp, Artificial Sequence
  Synthetic Sequence
gtagctcaaa

SEQ ID NO: 2428 - DNA, 10 bp, Artificial Sequence
  Synthetic Sequence
cggctgaaag

SEQ ID NO: 2429 - DNA, 10 bp, Artificial Sequence
  Synthetic Sequence
ttaagagtag

SEQ ID NO: 2430 - DNA, 10 bp, Artificial Sequence
  Synthetic Sequence
atgtttaata

SEQ ID NO: 2431 - DNA, 10 bp, Artificial Sequence
  Synthetic Sequence
cgaccgtatc

SEQ ID NO: 2432 - DNA, 10 bp, Artificial Sequence
  Synthetic Sequence
aacctgaacg

SEQ ID NO: 2433 - DNA, 10 bp, Artificial Sequence
  Synthetic Sequence
atatgtgggt

SEQ ID NO: 2434 - DNA, 10 bp, Artificial Sequence
  Synthetic Sequence
tattggcaag

SEQ ID NO: 2435 - DNA, 10 bp, Artificial Sequence
  Synthetic Sequence
aacgattgcc

SEQ ID NO: 2436 - DNA, 10 bp, Artificial Sequence
  Synthetic Sequence
cacgaatgag

SEQ ID NO: 2437 - DNA, 10 bp, Artificial Sequence
  Synthetic Sequence
gtcggcatgg

SEQ ID NO: 2438 - DNA, 10 bp, Artificial Sequence
  Synthetic Sequence
tgattgaggc

SEQ ID NO: 2439 - DNA, 10 bp, Artificial Sequence
  Synthetic Sequence
agagtgattg

SEQ ID NO: 2440 - DNA, 10 bp, Artificial Sequence
  Synthetic Sequence
ttcgtcttga

SEQ ID NO: 2441 - DNA, 10 bp, Artificial Sequence
  Synthetic Sequence
ctgaatttcg

SEQ ID NO: 2442 - DNA, 10 bp, Artificial Sequence
  Synthetic Sequence
ttgatctgcc

SEQ ID NO: 2443 - DNA, 10 bp, Artificial Sequence
  Synthetic Sequence
cattgctaaa

SEQ ID NO: 2444 - DNA, 10 bp, Artificial Sequence
  Synthetic Sequence
gcttcgttca

SEQ ID NO: 2445 - DNA, 10 bp, Artificial Sequence
  Synthetic Sequence
tgagccgttg

SEQ ID NO: 2446 - DNA, 10 bp, Artificial Sequence
  Synthetic Sequence
ttccgacgca

SEQ ID NO: 2447 - DNA, 10 bp, Artificial Sequence
  Synthetic Sequence
taacggttgc

SEQ ID NO: 2448 - DNA, 10 bp, Artificial Sequence
  Synthetic Sequence
gggaccagca

SEQ ID NO: 2449 - DNA, 10 bp, Artificial Sequence
  Synthetic Sequence
ttaatagaac

SEQ ID NO: 2450 - DNA, 10 bp, Artificial Sequence
  Synthetic Sequence
gtcaggaccc

SEQ ID NO: 2451 - DNA, 10 bp, Artificial Sequence
  Synthetic Sequence
gatatataga

SEQ ID NO: 2452 - DNA, 10 bp, Artificial Sequence
  Synthetic Sequence
ctgcgaactg

SEQ ID NO: 2453 - DNA, 10 bp, Artificial Sequence
  Synthetic Sequence
tggcggtagt

SEQ ID NO: 2454 - DNA, 10 bp, Artificial Sequence
  Synthetic Sequence
aactaaggag

SEQ ID NO: 2455 - DNA, 10 bp, Artificial Sequence
  Synthetic Sequence
tcagccctgg

SEQ ID NO: 2456 - DNA, 10 bp, Artificial Sequence
  Synthetic Sequence
cttatacctg

SEQ ID NO: 2457 - DNA, 10 bp, Artificial Sequence
  Synthetic Sequence
atggcaagtt

SEQ ID NO: 2458 - DNA, 10 bp, Artificial Sequence
  Synthetic Sequence
cacaccacgg

SEQ ID NO: 2459 - DNA, 10 bp, Artificial Sequence
  Synthetic Sequence
gaatatcgcg

SEQ ID NO: 2460 - DNA, 10 bp, Artificial Sequence
  Synthetic Sequence
catgtgcgcg

SEQ ID NO: 2461 - DNA, 10 bp, Artificial Sequence
  Synthetic Sequence
caaacttgtt

SEQ ID NO: 2462 - DNA, 10 bp, Artificial Sequence
  Synthetic Sequence
aacccggtct

SEQ ID NO: 2463 - DNA, 10 bp, Artificial Sequence
  Synthetic Sequence
acgttaagtc

SEQ ID NO: 2464 - DNA, 10 bp, Artificial Sequence
  Synthetic Sequence
gatgagggcc

SEQ ID NO: 2465 - DNA, 10 bp, Artificial Sequence
  Synthetic Sequence
cgagacgatg

SEQ ID NO: 2466 - DNA, 10 bp, Artificial Sequence
  Synthetic Sequence
accactggga

SEQ ID NO: 2467 - DNA, 10 bp, Artificial Sequence
  Synthetic Sequence
tggtctcgcg

SEQ ID NO: 2468 - DNA, 10 bp, Artificial Sequence
  Synthetic Sequence
ttgaccacag

SEQ ID NO: 2469 - DNA, 10 bp, Artificial Sequence
  Synthetic Sequence
gcgtattggg

SEQ ID NO: 2470 - DNA, 10 bp, Artificial Sequence
  Synthetic Sequence
gatctcctcc

SEQ ID NO: 2471 - DNA, 10 bp, Artificial Sequence
  Synthetic Sequence
ccgtccacgt

SEQ ID NO: 2472 - DNA, 10 bp, Artificial Sequence
  Synthetic Sequence
taagcgactc

SEQ ID NO: 2473 - DNA, 10 bp, Artificial Sequence
  Synthetic Sequence
gttcggtgtt

SEQ ID NO: 2474 - DNA, 10 bp, Artificial Sequence
  Synthetic Sequence
atttatttgt

SEQ ID NO: 2475 - DNA, 10 bp, Artificial Sequence
  Synthetic Sequence
ccttgaatag

SEQ ID NO: 2476 - DNA, 10 bp, Artificial Sequence
  Synthetic Sequence
gacacccgta

SEQ ID NO: 2477 - DNA, 10 bp, Artificial Sequence
  Synthetic Sequence
cggctcgaaa

SEQ ID NO: 2478 - DNA, 10 bp, Artificial Sequence
  Synthetic Sequence
gaacacattg

SEQ ID NO: 2479 - DNA, 10 bp, Artificial Sequence
  Synthetic Sequence
cgagagatga

SEQ ID NO: 2480 - DNA, 10 bp, Artificial Sequence
  Synthetic Sequence
acgcgatatt

SEQ ID NO: 2481 - DNA, 10 bp, Artificial Sequence
  Synthetic Sequence
catggatttc

SEQ ID NO: 2482 - DNA, 10 bp, Artificial Sequence
  Synthetic Sequence
ccacgtgaca

SEQ ID NO: 2483 - DNA, 10 bp, Artificial Sequence
  Synthetic Sequence
caaagcagca

SEQ ID NO: 2484 - DNA, 10 bp, Artificial Sequence
  Synthetic Sequence
agcgggtttc

SEQ ID NO: 2485 - DNA, 10 bp, Artificial Sequence
  Synthetic Sequence
cgagggtcct

SEQ ID NO: 2486 - DNA, 10 bp, Artificial Sequence
  Synthetic Sequence
ccggtcagtg

SEQ ID NO: 2487 - DNA, 10 bp, Artificial Sequence
  Synthetic Sequence
cctcagagtt

SEQ ID NO: 2488 - DNA, 10 bp, Artificial Sequence
  Synthetic Sequence
agtcgcttga

SEQ ID NO: 2489 - DNA, 10 bp, Artificial Sequence
  Synthetic Sequence
cgagtatggc

SEQ ID NO: 2490 - DNA, 10 bp, Artificial Sequence
  Synthetic Sequence
agcggagaag

SEQ ID NO: 2491 - DNA, 10 bp, Artificial Sequence
  Synthetic Sequence
gtcatgtggc

SEQ ID NO: 2492 - DNA, 10 bp, Artificial Sequence
  Synthetic Sequence
tgtcttgttg

SEQ ID NO: 2493 - DNA, 10 bp, Artificial Sequence
  Synthetic Sequence
gaggcgggtt

SEQ ID NO: 2494 - DNA, 10 bp, Artificial Sequence
  Synthetic Sequence
ggcaggtatg

SEQ ID NO: 2495 - DNA, 10 bp, Artificial Sequence
  Synthetic Sequence
gggctgtgct

SEQ ID NO: 2496 - DNA, 10 bp, Artificial Sequence
  Synthetic Sequence
cgaaattccg

SEQ ID NO: 2497 - DNA, 10 bp, Artificial Sequence
  Synthetic Sequence
gggcatccgt

SEQ ID NO: 2498 - DNA, 10 bp, Artificial Sequence
  Synthetic Sequence
acaatcgtgc

SEQ ID NO: 2499 - DNA, 10 bp, Artificial Sequence
  Synthetic Sequence
tacccaggga

SEQ ID NO: 2500 - DNA, 10 bp, Artificial Sequence
  Synthetic Sequence
ttccgttgga

SEQ ID NO: 2501 - DNA, 10 bp, Artificial Sequence
  Synthetic Sequence
cgaggccata

SEQ ID NO: 2502 - DNA, 10 bp, Artificial Sequence
  Synthetic Sequence
tccgccagca

SEQ ID NO: 2503 - DNA, 10 bp, Artificial Sequence
  Synthetic Sequence
tgagatagga

SEQ ID NO: 2504 - DNA, 10 bp, Artificial Sequence
  Synthetic Sequence
tgaactaaag

SEQ ID NO: 2505 - DNA, 10 bp, Artificial Sequence
  Synthetic Sequence
gaatttaggt

SEQ ID NO: 2506 - DNA, 10 bp, Artificial Sequence
  Synthetic Sequence
ggctcagtgt

SEQ ID NO: 2507 - DNA, 10 bp, Artificial Sequence
  Synthetic Sequence
ggcgaggtga

SEQ ID NO: 2508 - DNA, 10 bp, Artificial Sequence
  Synthetic Sequence
aatgagtatt

SEQ ID NO: 2509 - DNA, 10 bp, Artificial Sequence
  Synthetic Sequence
gacactacaa

SEQ ID NO: 2510 - DNA, 10 bp, Artificial Sequence
  Synthetic Sequence
gcgagtatga

SEQ ID NO: 2511 - DNA, 10 bp, Artificial Sequence
  Synthetic Sequence
acccttgaat

SEQ ID NO: 2512 - DNA, 10 bp, Artificial Sequence
  Synthetic Sequence
ggtagacaat

SEQ ID NO: 2513 - DNA, 10 bp, Artificial Sequence
  Synthetic Sequence
atgcagacgc

SEQ ID NO: 2514 - DNA, 10 bp, Artificial Sequence
  Synthetic Sequence
tgggtgatgg

SEQ ID NO: 2515 - DNA, 10 bp, Artificial Sequence
  Synthetic Sequence
cggacattga

SEQ ID NO: 2516 - DNA, 10 bp, Artificial Sequence
  Synthetic Sequence
taagtacttg

SEQ ID NO: 2517 - DNA, 10 bp, Artificial Sequence
  Synthetic Sequence
tttctcgaat

SEQ ID NO: 2518 - DNA, 10 bp, Artificial Sequence
  Synthetic Sequence
cgagatgtcg

SEQ ID NO: 2519 - DNA, 10 bp, Artificial Sequence
  Synthetic Sequence
gatccttcag

SEQ ID NO: 2520 - DNA, 10 bp, Artificial Sequence
  Synthetic Sequence
ggtttaagaa

SEQ ID NO: 2521 - DNA, 10 bp, Artificial Sequence
  Synthetic Sequence
tcgttggtct

SEQ ID NO: 2522 - DNA, 10 bp, Artificial Sequence
  Synthetic Sequence
gccgtggcta

SEQ ID NO: 2523 - DNA, 10 bp, Artificial Sequence
  Synthetic Sequence
aacttacgac

SEQ ID NO: 2524 - DNA, 10 bp, Artificial Sequence
  Synthetic Sequence
taggcgttga

SEQ ID NO: 2525 - DNA, 10 bp, Artificial Sequence
  Synthetic Sequence
actatctaga

SEQ ID NO: 2526 - DNA, 10 bp, Artificial Sequence
  Synthetic Sequence
tccgtccatc

SEQ ID NO: 2527 - DNA, 10 bp, Artificial Sequence
  Synthetic Sequence
gtggatgtca

SEQ ID NO: 2528 - DNA, 10 bp, Artificial Sequence
  Synthetic Sequence
agactagatt

SEQ ID NO: 2529 - DNA, 10 bp, Artificial Sequence
  Synthetic Sequence
tttacctggg

SEQ ID NO: 2530 - DNA, 10 bp, Artificial Sequence
  Synthetic Sequence
acaacccgcg

SEQ ID NO: 2531 - DNA, 10 bp, Artificial Sequence
  Synthetic Sequence
gtattctgca

SEQ ID NO: 2532 - DNA, 10 bp, Artificial Sequence
  Synthetic Sequence
gcgggtacat

SEQ ID NO: 2533 - DNA, 10 bp, Artificial Sequence
  Synthetic Sequence
aagccagaac

SEQ ID NO: 2534 - DNA, 10 bp, Artificial Sequence
  Synthetic Sequence
tggactataa

SEQ ID NO: 2535 - DNA, 10 bp, Artificial Sequence
  Synthetic Sequence
cactacacac

SEQ ID NO: 2536 - DNA, 10 bp, Artificial Sequence
  Synthetic Sequence
aagccttcgg

SEQ ID NO: 2537 - DNA, 10 bp, Artificial Sequence
  Synthetic Sequence
aatccatggc

SEQ ID NO: 2538 - DNA, 10 bp, Artificial Sequence
  Synthetic Sequence
ctcacaacac

SEQ ID NO: 2539 - DNA, 10 bp, Artificial Sequence
  Synthetic Sequence
ccacggaagg

SEQ ID NO: 2540 - DNA, 10 bp, Artificial Sequence
  Synthetic Sequence
tcaaggcagt

SEQ ID NO: 2541 - DNA, 10 bp, Artificial Sequence
  Synthetic Sequence
gggatggatc

SEQ ID NO: 2542 - DNA, 10 bp, Artificial Sequence
  Synthetic Sequence
agctcatagg

SEQ ID NO: 2543 - DNA, 10 bp, Artificial Sequence
  Synthetic Sequence
gttgccgcca

SEQ ID NO: 2544 - DNA, 10 bp, Artificial Sequence
  Synthetic Sequence
ggatgtacaa

SEQ ID NO: 2545 - DNA, 10 bp, Artificial Sequence
  Synthetic Sequence
gcgttagact

SEQ ID NO: 2546 - DNA, 10 bp, Artificial Sequence
  Synthetic Sequence
ttaaactcat

SEQ ID NO: 2547 - DNA, 10 bp, Artificial Sequence
  Synthetic Sequence
accagggcat

SEQ ID NO: 2548 - DNA, 10 bp, Artificial Sequence
  Synthetic Sequence
gcctcaagga

SEQ ID NO: 2549 - DNA, 10 bp, Artificial Sequence
  Synthetic Sequence
gtttgagtac

SEQ ID NO: 2550 - DNA, 10 bp, Artificial Sequence
  Synthetic Sequence
acagtagtcg

SEQ ID NO: 2551 - DNA, 10 bp, Artificial Sequence
  Synthetic Sequence
tactgcacta

SEQ ID NO: 2552 - DNA, 10 bp, Artificial Sequence
  Synthetic Sequence
gatctacatg

SEQ ID NO: 2553 - DNA, 10 bp, Artificial Sequence
  Synthetic Sequence
gaacagtatt

SEQ ID NO: 2554 - DNA, 10 bp, Artificial Sequence
  Synthetic Sequence
attctgcaat

SEQ ID NO: 2555 - DNA, 10 bp, Artificial Sequence
  Synthetic Sequence
tgccttccgt

SEQ ID NO: 2556 - DNA, 10 bp, Artificial Sequence
  Synthetic Sequence
acttcgatga

SEQ ID NO: 2557 - DNA, 10 bp, Artificial Sequence
  Synthetic Sequence
gcacaccctg

SEQ ID NO: 2558 - DNA, 10 bp, Artificial Sequence
  Synthetic Sequence
ccagagggca

SEQ ID NO: 2559 - DNA, 10 bp, Artificial Sequence
  Synthetic Sequence
tctgcgagag

SEQ ID NO: 2560 - DNA, 10 bp, Artificial Sequence
  Synthetic Sequence
aggttcacgc

SEQ ID NO: 2561 - DNA, 10 bp, Artificial Sequence
  Synthetic Sequence
gcgagctgaa

SEQ ID NO: 2562 - DNA, 10 bp, Artificial Sequence
  Synthetic Sequence
gggagtggtg

SEQ ID NO: 2563 - DNA, 10 bp, Artificial Sequence
  Synthetic Sequence
agatcgacgt

SEQ ID NO: 2564 - DNA, 10 bp, Artificial Sequence
  Synthetic Sequence
taatctctag

SEQ ID NO: 2565 - DNA, 10 bp, Artificial Sequence
  Synthetic Sequence
gcgtcatctg

SEQ ID NO: 2566 - DNA, 10 bp, Artificial Sequence
  Synthetic Sequence
aatagttgtt

SEQ ID NO: 2567 - DNA, 10 bp, Artificial Sequence
  Synthetic Sequence
gaccgtcagc

SEQ ID NO: 2568 - DNA, 10 bp, Artificial Sequence
  Synthetic Sequence
gcagcaagat

SEQ ID NO: 2569 - DNA, 10 bp, Artificial Sequence
  Synthetic Sequence
gatagaggtc

SEQ ID NO: 2570 - DNA, 10 bp, Artificial Sequence
  Synthetic Sequence
tgtatcattt

SEQ ID NO: 2571 - DNA, 10 bp, Artificial Sequence
  Synthetic Sequence
tcgcaattct

SEQ ID NO: 2572 - DNA, 10 bp, Artificial Sequence
  Synthetic Sequence
tttcggagcc

SEQ ID NO: 2573 - DNA, 10 bp, Artificial Sequence
  Synthetic Sequence
aacgcaagcc

SEQ ID NO: 2574 - DNA, 10 bp, Artificial Sequence
  Synthetic Sequence
gtgctttctc

SEQ ID NO: 2575 - DNA, 10 bp, Artificial Sequence
  Synthetic Sequence
tgccaaacct

SEQ ID NO: 2576 - DNA, 10 bp, Artificial Sequence
  Synthetic Sequence
cggccttagt

SEQ ID NO: 2577 - DNA, 10 bp, Artificial Sequence
  Synthetic Sequence
ccactccagc

SEQ ID NO: 2578 - DNA, 10 bp, Artificial Sequence
  Synthetic Sequence
aacccaatgg

SEQ ID NO: 2579 - DNA, 10 bp, Artificial Sequence
  Synthetic Sequence
gacccatgtt

SEQ ID NO: 2580 - DNA, 10 bp, Artificial Sequence
  Synthetic Sequence
ccgggatatg

SEQ ID NO: 2581 - DNA, 10 bp, Artificial Sequence
  Synthetic Sequence
gcgggcagtt

SEQ ID NO: 2582 - DNA, 10 bp, Artificial Sequence
  Synthetic Sequence
agccgataga

SEQ ID NO: 2583 - DNA, 10 bp, Artificial Sequence
  Synthetic Sequence
ggagtctcgt

SEQ ID NO: 2584 - DNA, 10 bp, Artificial Sequence
  Synthetic Sequence
aacgtatagt

SEQ ID NO: 2585 - DNA, 10 bp, Artificial Sequence
  Synthetic Sequence
cacccttata

SEQ ID NO: 2586 - DNA, 10 bp, Artificial Sequence
  Synthetic Sequence
ctagcatctt

SEQ ID NO: 2587 - DNA, 10 bp, Artificial Sequence
  Synthetic Sequence
tgatttagta

SEQ ID NO: 2588 - DNA, 10 bp, Artificial Sequence
  Synthetic Sequence
cgtaatgatc

SEQ ID NO: 2589 - DNA, 10 bp, Artificial Sequence
  Synthetic Sequence
gctgatagtg

SEQ ID NO: 2590 - DNA, 10 bp, Artificial Sequence
  Synthetic Sequence
tccataggcg

SEQ ID NO: 2591 - DNA, 10 bp, Artificial Sequence
  Synthetic Sequence
ccacccaatg

SEQ ID NO: 2592 - DNA, 10 bp, Artificial Sequence
  Synthetic Sequence
tggctcatta

SEQ ID NO: 2593 - DNA, 10 bp, Artificial Sequence
  Synthetic Sequence
acctgagtct

SEQ ID NO: 2594 - DNA, 10 bp, Artificial Sequence
  Synthetic Sequence
ttgaatagaa

SEQ ID NO: 2595 - DNA, 10 bp, Artificial Sequence
  Synthetic Sequence
acgtttgcaa

SEQ ID NO: 2596 - DNA, 10 bp, Artificial Sequence
  Synthetic Sequence
ttcttatcca

SEQ ID NO: 2597 - DNA, 10 bp, Artificial Sequence
  Synthetic Sequence
tttattacca

SEQ ID NO: 2598 - DNA, 10 bp, Artificial Sequence
  Synthetic Sequence
tatctcagtt

SEQ ID NO: 2599 - DNA, 10 bp, Artificial Sequence
  Synthetic Sequence
tgtaactcaa

SEQ ID NO: 2600 - DNA, 10 bp, Artificial Sequence
  Synthetic Sequence
cttctgcaga

SEQ ID NO: 2601 - DNA, 10 bp, Artificial Sequence
  Synthetic Sequence
cgagacatct

SEQ ID NO: 2602 - DNA, 10 bp, Artificial Sequence
  Synthetic Sequence
tttctgaaca

SEQ ID NO: 2603 - DNA, 10 bp, Artificial Sequence
  Synthetic Sequence
tcgtgatgct

SEQ ID NO: 2604 - DNA, 10 bp, Artificial Sequence
  Synthetic Sequence
acggtcgata

SEQ ID NO: 2605 - DNA, 10 bp, Artificial Sequence
  Synthetic Sequence
gtggcagtgt

SEQ ID NO: 2606 - DNA, 10 bp, Artificial Sequence
  Synthetic Sequence
agggcgcagt

SEQ ID NO: 2607 - DNA, 10 bp, Artificial Sequence
  Synthetic Sequence
ccgatctata

SEQ ID NO: 2608 - DNA, 10 bp, Artificial Sequence
  Synthetic Sequence
agctccgcat

SEQ ID NO: 2609 - DNA, 10 bp, Artificial Sequence
  Synthetic Sequence
ctccaaatac

SEQ ID NO: 2610 - DNA, 10 bp, Artificial Sequence
  Synthetic Sequence
gctcacctag

SEQ ID NO: 2611 - DNA, 10 bp, Artificial Sequence
  Synthetic Sequence
tgatatgaaa

SEQ ID NO: 2612 - DNA, 10 bp, Artificial Sequence
  Synthetic Sequence
agtcggctgg

SEQ ID NO: 2613 - DNA, 10 bp, Artificial Sequence
  Synthetic Sequence
cttcctgctg

SEQ ID NO: 2614 - DNA, 10 bp, Artificial Sequence
  Synthetic Sequence
ggctacagac

SEQ ID NO: 2615 - DNA, 10 bp, Artificial Sequence
  Synthetic Sequence
cccaggatgg

SEQ ID NO: 2616 - DNA, 10 bp, Artificial Sequence
  Synthetic Sequence
aggcaacgcg

SEQ ID NO: 2617 - DNA, 10 bp, Artificial Sequence
  Synthetic Sequence
ttaccaatac

SEQ ID NO: 2618 - DNA, 10 bp, Artificial Sequence
  Synthetic Sequence
accgagtttg

SEQ ID NO: 2619 - DNA, 10 bp, Artificial Sequence
  Synthetic Sequence
agttagtctg

SEQ ID NO: 2620 - DNA, 10 bp, Artificial Sequence
  Synthetic Sequence
gacgtcactt

SEQ ID NO: 2621 - DNA, 10 bp, Artificial Sequence
  Synthetic Sequence
ttgctcccat

SEQ ID NO: 2622 - DNA, 10 bp, Artificial Sequence
  Synthetic Sequence
tagagtttct

SEQ ID NO: 2623 - DNA, 10 bp, Artificial Sequence
  Synthetic Sequence
agatatacag

SEQ ID NO: 2624 - DNA, 10 bp, Artificial Sequence
  Synthetic Sequence
ccgacagctc

SEQ ID NO: 2625 - DNA, 10 bp, Artificial Sequence
  Synthetic Sequence
gttactggtc

SEQ ID NO: 2626 - DNA, 10 bp, Artificial Sequence
  Synthetic Sequence
accactacac

SEQ ID NO: 2627 - DNA, 10 bp, Artificial Sequence
  Synthetic Sequence
tgtcaagtca

SEQ ID NO: 2628 - DNA, 10 bp, Artificial Sequence
  Synthetic Sequence
ctcatgggcc

SEQ ID NO: 2629 - DNA, 10 bp, Artificial Sequence
  Synthetic Sequence
gacagcatac

SEQ ID NO: 2630 - DNA, 10 bp, Artificial Sequence
  Synthetic Sequence
ggaagcgagc

SEQ ID NO: 2631 - DNA, 10 bp, Artificial Sequence
  Synthetic Sequence
taccaacggc

SEQ ID NO: 2632 - DNA, 10 bp, Artificial Sequence
  Synthetic Sequence
cttggcattg

SEQ ID NO: 2633 - DNA, 10 bp, Artificial Sequence
  Synthetic Sequence
ctttagcctc

SEQ ID NO: 2634 - DNA, 10 bp, Artificial Sequence
  Synthetic Sequence
gcagaccgat

SEQ ID NO: 2635 - DNA, 10 bp, Artificial Sequence
  Synthetic Sequence
gccctaccct

SEQ ID NO: 2636 - DNA, 10 bp, Artificial Sequence
  Synthetic Sequence
tatcgacaca

SEQ ID NO: 2637 - DNA, 10 bp, Artificial Sequence
  Synthetic Sequence
cttctacgcc

SEQ ID NO: 2638 - DNA, 10 bp, Artificial Sequence
  Synthetic Sequence
gcacagtaga

SEQ ID NO: 2639 - DNA, 10 bp, Artificial Sequence
  Synthetic Sequence
aaacagataa

SEQ ID NO: 2640 - DNA, 10 bp, Artificial Sequence
  Synthetic Sequence
gtagtagtac

SEQ ID NO: 2641 - DNA, 10 bp, Artificial Sequence
  Synthetic Sequence
tgtcgccgat

SEQ ID NO: 2642 - DNA, 10 bp, Artificial Sequence
  Synthetic Sequence
gtgatgacta

SEQ ID NO: 2643 - DNA, 10 bp, Artificial Sequence
  Synthetic Sequence
taaatttgaa

SEQ ID NO: 2644 - DNA, 10 bp, Artificial Sequence
  Synthetic Sequence
acgagattca

SEQ ID NO: 2645 - DNA, 10 bp, Artificial Sequence
  Synthetic Sequence
gtatttccga

SEQ ID NO: 2646 - DNA, 10 bp, Artificial Sequence
  Synthetic Sequence
tattcgcggt

SEQ ID NO: 2647 - DNA, 10 bp, Artificial Sequence
  Synthetic Sequence
accagtcagt

SEQ ID NO: 2648 - DNA, 10 bp, Artificial Sequence
  Synthetic Sequence
gttcgcccta

SEQ ID NO: 2649 - DNA, 10 bp, Artificial Sequence
  Synthetic Sequence
gacactgaag

SEQ ID NO: 2650 - DNA, 10 bp, Artificial Sequence
  Synthetic Sequence
tacgtttacg

SEQ ID NO: 2651 - DNA, 10 bp, Artificial Sequence
  Synthetic Sequence
tgtaagctaa

SEQ ID NO: 2652 - DNA, 10 bp, Artificial Sequence
  Synthetic Sequence
agtacgccta

SEQ ID NO: 2653 - DNA, 10 bp, Artificial Sequence
  Synthetic Sequence
gcattaggca

SEQ ID NO: 2654 - DNA, 10 bp, Artificial Sequence
  Synthetic Sequence
cattaagatg

SEQ ID NO: 2655 - DNA, 10 bp, Artificial Sequence
  Synthetic Sequence
cccgcatgct

SEQ ID NO: 2656 - DNA, 10 bp, Artificial Sequence
  Synthetic Sequence
tgcgatatcc

SEQ ID NO: 2657 - DNA, 10 bp, Artificial Sequence
  Synthetic Sequence
gatactgcat

SEQ ID NO: 2658 - DNA, 10 bp, Artificial Sequence
  Synthetic Sequence
gcgttcccgt

SEQ ID NO: 2659 - DNA, 10 bp, Artificial Sequence
  Synthetic Sequence
gaagtgttca

SEQ ID NO: 2660 - DNA, 10 bp, Artificial Sequence
  Synthetic Sequence
ccgtccgatc

SEQ ID NO: 2661 - DNA, 10 bp, Artificial Sequence
  Synthetic Sequence
aaggttagca

SEQ ID NO: 2662 - DNA, 10 bp, Artificial Sequence
  Synthetic Sequence
caacctataa

SEQ ID NO: 2663 - DNA, 10 bp, Artificial Sequence
  Synthetic Sequence
cctgttggac

SEQ ID NO: 2664 - DNA, 10 bp, Artificial Sequence
  Synthetic Sequence
tgaggagtga

SEQ ID NO: 2665 - DNA, 10 bp, Artificial Sequence
  Synthetic Sequence
atcgtagcaa

SEQ ID NO: 2666 - DNA, 10 bp, Artificial Sequence
  Synthetic Sequence
gaccatatat

SEQ ID NO: 2667 - DNA, 10 bp, Artificial Sequence
  Synthetic Sequence
ctgagggagg

SEQ ID NO: 2668 - DNA, 10 bp, Artificial Sequence
  Synthetic Sequence
acgctttggt

SEQ ID NO: 2669 - DNA, 10 bp, Artificial Sequence
  Synthetic Sequence
gaaaggtcaa

SEQ ID NO: 2670 - DNA, 10 bp, Artificial Sequence
  Synthetic Sequence
cttgaggtag

SEQ ID NO: 2671 - DNA, 10 bp, Artificial Sequence
  Synthetic Sequence
gggtgggaga

SEQ ID NO: 2672 - DNA, 10 bp, Artificial Sequence
  Synthetic Sequence
taccgaagcc

SEQ ID NO: 2673 - DNA, 10 bp, Artificial Sequence
  Synthetic Sequence
tcttaagcac

SEQ ID NO: 2674 - DNA, 10 bp, Artificial Sequence
  Synthetic Sequence
actgagcgga

SEQ ID NO: 2675 - DNA, 10 bp, Artificial Sequence
  Synthetic Sequence
tcggaatggc

SEQ ID NO: 2676 - DNA, 10 bp, Artificial Sequence
  Synthetic Sequence
tcaaagagtt

SEQ ID NO: 2677 - DNA, 10 bp, Artificial Sequence
  Synthetic Sequence
agtcttctct

SEQ ID NO: 2678 - DNA, 10 bp, Artificial Sequence
  Synthetic Sequence
tctcacacca

SEQ ID NO: 2679 - DNA, 10 bp, Artificial Sequence
  Synthetic Sequence
tgaaagtcac

SEQ ID NO: 2680 - DNA, 10 bp, Artificial Sequence
  Synthetic Sequence
agcgctaagt

SEQ ID NO: 2681 - DNA, 10 bp, Artificial Sequence
  Synthetic Sequence
aggtccaaca

SEQ ID NO: 2682 - DNA, 10 bp, Artificial Sequence
  Synthetic Sequence
gacctgtcga

SEQ ID NO: 2683 - DNA, 10 bp, Artificial Sequence
  Synthetic Sequence
acgctagtac

SEQ ID NO: 2684 - DNA, 10 bp, Artificial Sequence
  Synthetic Sequence
ccaggtttgc

SEQ ID NO: 2685 - DNA, 10 bp, Artificial Sequence
  Synthetic Sequence
tggctacctc

SEQ ID NO: 2686 - DNA, 10 bp, Artificial Sequence
  Synthetic Sequence
ccgcagtgtg

SEQ ID NO: 2687 - DNA, 10 bp, Artificial Sequence
  Synthetic Sequence
tacacaacag

SEQ ID NO: 2688 - DNA, 10 bp, Artificial Sequence
  Synthetic Sequence
ttctgtacat

SEQ ID NO: 2689 - DNA, 10 bp, Artificial Sequence
  Synthetic Sequence
gccaatctgt

SEQ ID NO: 2690 - DNA, 10 bp, Artificial Sequence
  Synthetic Sequence
catggcatga

SEQ ID NO: 2691 - DNA, 10 bp, Artificial Sequence
  Synthetic Sequence
ttattaacct

SEQ ID NO: 2692 - DNA, 10 bp, Artificial Sequence
  Synthetic Sequence
ctacgggctg

SEQ ID NO: 2693 - DNA, 10 bp, Artificial Sequence
  Synthetic Sequence
aggatcactg

SEQ ID NO: 2694 - DNA, 10 bp, Artificial Sequence
  Synthetic Sequence
tgtgcagcca

SEQ ID NO: 2695 - DNA, 10 bp, Artificial Sequence
  Synthetic Sequence
ctcttgcgct

SEQ ID NO: 2696 - DNA, 10 bp, Artificial Sequence
  Synthetic Sequence
cagccagagt

SEQ ID NO: 2697 - DNA, 10 bp, Artificial Sequence
  Synthetic Sequence
agccgagcct

SEQ ID NO: 2698 - DNA, 10 bp, Artificial Sequence
  Synthetic Sequence
gcggacaaca

SEQ ID NO: 2699 - DNA, 10 bp, Artificial Sequence
  Synthetic Sequence
acctgacaca

SEQ ID NO: 2700 - DNA, 10 bp, Artificial Sequence
  Synthetic Sequence
gcactattga

SEQ ID NO: 2701 - DNA, 10 bp, Artificial Sequence
  Synthetic Sequence
caaagataca

SEQ ID NO: 2702 - DNA, 10 bp, Artificial Sequence
  Synthetic Sequence
acttacctgt

SEQ ID NO: 2703 - DNA, 10 bp, Artificial Sequence
  Synthetic Sequence
gattattggt

SEQ ID NO: 2704 - DNA, 10 bp, Artificial Sequence
  Synthetic Sequence
atcctcggga

SEQ ID NO: 2705 - DNA, 10 bp, Artificial Sequence
  Synthetic Sequence
cgccactagc

SEQ ID NO: 2706 - DNA, 10 bp, Artificial Sequence
  Synthetic Sequence
taagaacgga

SEQ ID NO: 2707 - DNA, 10 bp, Artificial Sequence
  Synthetic Sequence
cagatttcag

SEQ ID NO: 2708 - DNA, 10 bp, Artificial Sequence
  Synthetic Sequence
catagataat

SEQ ID NO: 2709 - DNA, 10 bp, Artificial Sequence
  Synthetic Sequence
cacacggcac

SEQ ID NO: 2710 - DNA, 10 bp, Artificial Sequence
  Synthetic Sequence
gtatcccgcc

SEQ ID NO: 2711 - DNA, 10 bp, Artificial Sequence
  Synthetic Sequence
atgttcgcat

SEQ ID NO: 2712 - DNA, 10 bp, Artificial Sequence
  Synthetic Sequence
cgaattggga

SEQ ID NO: 2713 - DNA, 10 bp, Artificial Sequence
  Synthetic Sequence
gaagcacctc

SEQ ID NO: 2714 - DNA, 10 bp, Artificial Sequence
  Synthetic Sequence
actgactact

SEQ ID NO: 2715 - DNA, 10 bp, Artificial Sequence
  Synthetic Sequence
tactcgaacc

SEQ ID NO: 2716 - DNA, 10 bp, Artificial Sequence
  Synthetic Sequence
gtgtgctggt

SEQ ID NO: 2717 - DNA, 10 bp, Artificial Sequence
  Synthetic Sequence
agctttctcc

SEQ ID NO: 2718 - DNA, 10 bp, Artificial Sequence
  Synthetic Sequence
ccattattgt

SEQ ID NO: 2719 - DNA, 10 bp, Artificial Sequence
  Synthetic Sequence
attagggaaa

SEQ ID NO: 2720 - DNA, 10 bp, Artificial Sequence
  Synthetic Sequence
ttgagacctt

SEQ ID NO: 2721 - DNA, 10 bp, Artificial Sequence
  Synthetic Sequence
ctgtccgcct

SEQ ID NO: 2722 - DNA, 10 bp, Artificial Sequence
  Synthetic Sequence
atgtctcagg

SEQ ID NO: 2723 - DNA, 10 bp, Artificial Sequence
  Synthetic Sequence
cagtctagga

SEQ ID NO: 2724 - DNA, 10 bp, Artificial Sequence
  Synthetic Sequence
ctgagcggag

SEQ ID NO: 2725 - DNA, 10 bp, Artificial Sequence
  Synthetic Sequence
ctatcagtga

SEQ ID NO: 2726 - DNA, 10 bp, Artificial Sequence
  Synthetic Sequence
cccaatgcgc

SEQ ID NO: 2727 - DNA, 10 bp, Artificial Sequence
  Synthetic Sequence
gcttgcccat

SEQ ID NO: 2728 - DNA, 10 bp, Artificial Sequence
  Synthetic Sequence
agtcaaggag

SEQ ID NO: 2729 - DNA, 10 bp, Artificial Sequence
  Synthetic Sequence
ttcattcagg

SEQ ID NO: 2730 - DNA, 10 bp, Artificial Sequence
  Synthetic Sequence
ggagttgact

SEQ ID NO: 2731 - DNA, 10 bp, Artificial Sequence
  Synthetic Sequence
tcccggcgta

SEQ ID NO: 2732 - DNA, 10 bp, Artificial Sequence
  Synthetic Sequence
cctaacgaag

SEQ ID NO: 2733 - DNA, 10 bp, Artificial Sequence
  Synthetic Sequence
ttccaagcgt

SEQ ID NO: 2734 - DNA, 10 bp, Artificial Sequence
  Synthetic Sequence
atgcagtgta

SEQ ID NO: 2735 - DNA, 10 bp, Artificial Sequence
  Synthetic Sequence
cgtgcgctca

SEQ ID NO: 2736 - DNA, 10 bp, Artificial Sequence
  Synthetic Sequence
ggcgttggtg

SEQ ID NO: 2737 - DNA, 10 bp, Artificial Sequence
  Synthetic Sequence
tagtattgcg

SEQ ID NO: 2738 - DNA, 10 bp, Artificial Sequence
  Synthetic Sequence
ttaccctcaa

SEQ ID NO: 2739 - DNA, 10 bp, Artificial Sequence
  Synthetic Sequence
aggaggccga

SEQ ID NO: 2740 - DNA, 10 bp, Artificial Sequence
  Synthetic Sequence
gatagcttta

SEQ ID NO: 2741 - DNA, 10 bp, Artificial Sequence
  Synthetic Sequence
gggatcggat

SEQ ID NO: 2742 - DNA, 10 bp, Artificial Sequence
  Synthetic Sequence
ataatgcgtt

SEQ ID NO: 2743 - DNA, 10 bp, Artificial Sequence
  Synthetic Sequence
tcctatctag

SEQ ID NO: 2744 - DNA, 10 bp, Artificial Sequence
  Synthetic Sequence
cggactgcca

SEQ ID NO: 2745 - DNA, 10 bp, Artificial Sequence
  Synthetic Sequence
tgtagagaca

SEQ ID NO: 2746 - DNA, 10 bp, Artificial Sequence
  Synthetic Sequence
aaagttaccc

SEQ ID NO: 2747 - DNA, 10 bp, Artificial Sequence
  Synthetic Sequence
cctcaccgtc

SEQ ID NO: 2748 - DNA, 10 bp, Artificial Sequence
  Synthetic Sequence
tgaaggatgg

SEQ ID NO: 2749 - DNA, 10 bp, Artificial Sequence
  Synthetic Sequence
aagtgtgccc

SEQ ID NO: 2750 - DNA, 10 bp, Artificial Sequence
  Synthetic Sequence
tggaggacct

SEQ ID NO: 2751 - DNA, 10 bp, Artificial Sequence
  Synthetic Sequence
gaataggata

SEQ ID NO: 2752 - DNA, 10 bp, Artificial Sequence
  Synthetic Sequence
agcgaggcac

SEQ ID NO: 2753 - DNA, 10 bp, Artificial Sequence
  Synthetic Sequence
ccactttctt

SEQ ID NO: 2754 - DNA, 10 bp, Artificial Sequence
  Synthetic Sequence
gtcctactcg

SEQ ID NO: 2755 - DNA, 10 bp, Artificial Sequence
  Synthetic Sequence
gaagttcggc

SEQ ID NO: 2756 - DNA, 10 bp, Artificial Sequence
  Synthetic Sequence
taagtatgcg

SEQ ID NO: 2757 - DNA, 10 bp, Artificial Sequence
  Synthetic Sequence
gccactcact

SEQ ID NO: 2758 - DNA, 10 bp, Artificial Sequence
  Synthetic Sequence
acggaaggcc

SEQ ID NO: 2759 - DNA, 10 bp, Artificial Sequence
  Synthetic Sequence
ggatagaccc

SEQ ID NO: 2760 - DNA, 10 bp, Artificial Sequence
  Synthetic Sequence
tctctactaa

SEQ ID NO: 2761 - DNA, 10 bp, Artificial Sequence
  Synthetic Sequence
gttgggacga

SEQ ID NO: 2762 - DNA, 10 bp, Artificial Sequence
  Synthetic Sequence
tgggaattac

SEQ ID NO: 2763 - DNA, 10 bp, Artificial Sequence
  Synthetic Sequence
gcggtgactg

SEQ ID NO: 2764 - DNA, 10 bp, Artificial Sequence
  Synthetic Sequence
tccgtgatcc

SEQ ID NO: 2765 - DNA, 10 bp, Artificial Sequence
  Synthetic Sequence
aatcgtagga

SEQ ID NO: 2766 - DNA, 10 bp, Artificial Sequence
  Synthetic Sequence
gaccataacc

SEQ ID NO: 2767 - DNA, 10 bp, Artificial Sequence
  Synthetic Sequence
acaggatcca

SEQ ID NO: 2768 - DNA, 10 bp, Artificial Sequence
  Synthetic Sequence
ctatcaagag

SEQ ID NO: 2769 - DNA, 10 bp, Artificial Sequence
  Synthetic Sequence
ccattccatg

SEQ ID NO: 2770 - DNA, 10 bp, Artificial Sequence
  Synthetic Sequence
ttcagccgat

SEQ ID NO: 2771 - DNA, 10 bp, Artificial Sequence
  Synthetic Sequence
tatatcgaag

SEQ ID NO: 2772 - DNA, 10 bp, Artificial Sequence
  Synthetic Sequence
tttactaatg

SEQ ID NO: 2773 - DNA, 10 bp, Artificial Sequence
  Synthetic Sequence
gtctgaatgt

SEQ ID NO: 2774 - DNA, 10 bp, Artificial Sequence
  Synthetic Sequence
tcatagacta

SEQ ID NO: 2775 - DNA, 10 bp, Artificial Sequence
  Synthetic Sequence
tatggactcg

SEQ ID NO: 2776 - DNA, 10 bp, Artificial Sequence
  Synthetic Sequence
aatgggcttg

SEQ ID NO: 2777 - DNA, 10 bp, Artificial Sequence
  Synthetic Sequence
cgtcaagctg

SEQ ID NO: 2778 - DNA, 10 bp, Artificial Sequence
  Synthetic Sequence
agaggtgtta

SEQ ID NO: 2779 - DNA, 10 bp, Artificial Sequence
  Synthetic Sequence
agggcagctg

SEQ ID NO: 2780 - DNA, 10 bp, Artificial Sequence
  Synthetic Sequence
tggcatccac

SEQ ID NO: 2781 - DNA, 10 bp, Artificial Sequence
  Synthetic Sequence
ttacatcaga

SEQ ID NO: 2782 - DNA, 10 bp, Artificial Sequence
  Synthetic Sequence
ataagaacat

SEQ ID NO: 2783 - DNA, 10 bp, Artificial Sequence
  Synthetic Sequence
atacatggca

SEQ ID NO: 2784 - DNA, 10 bp, Artificial Sequence
  Synthetic Sequence
cagcctgtcc

SEQ ID NO: 2785 - DNA, 10 bp, Artificial Sequence
  Synthetic Sequence
agaaagaggt

SEQ ID NO: 2786 - DNA, 10 bp, Artificial Sequence
  Synthetic Sequence
cagtagagcc

SEQ ID NO: 2787 - DNA, 10 bp, Artificial Sequence
  Synthetic Sequence
gaacagacct

SEQ ID NO: 2788 - DNA, 10 bp, Artificial Sequence
  Synthetic Sequence
atgttaccaa

SEQ ID NO: 2789 - DNA, 10 bp, Artificial Sequence
  Synthetic Sequence
acgatgcaag

SEQ ID NO: 2790 - DNA, 10 bp, Artificial Sequence
  Synthetic Sequence
tcaaaggcgg

SEQ ID NO: 2791 - DNA, 10 bp, Artificial Sequence
  Synthetic Sequence
taggcggacc

SEQ ID NO: 2792 - DNA, 10 bp, Artificial Sequence
  Synthetic Sequence
cggttgcatc

SEQ ID NO: 2793 - DNA, 10 bp, Artificial Sequence
  Synthetic Sequence
gctagagaaa

SEQ ID NO: 2794 - DNA, 10 bp, Artificial Sequence
  Synthetic Sequence
gtatcttgtt

SEQ ID NO: 2795 - DNA, 10 bp, Artificial Sequence
  Synthetic Sequence
gttagcgtct

SEQ ID NO: 2796 - DNA, 10 bp, Artificial Sequence
  Synthetic Sequence
agttcgcaga

SEQ ID NO: 2797 - DNA, 10 bp, Artificial Sequence
  Synthetic Sequence
ggttacttta

SEQ ID NO: 2798 - DNA, 10 bp, Artificial Sequence
  Synthetic Sequence
ggtgatttgt

SEQ ID NO: 2799 - DNA, 10 bp, Artificial Sequence
  Synthetic Sequence
tgagcggaaa

SEQ ID NO: 2800 - DNA, 10 bp, Artificial Sequence
  Synthetic Sequence
gagatttggc

SEQ ID NO: 2801 - DNA, 10 bp, Artificial Sequence
  Synthetic Sequence
tgggacgtct

SEQ ID NO: 2802 - DNA, 10 bp, Artificial Sequence
  Synthetic Sequence
gcccagtggt

SEQ ID NO: 2803 - DNA, 10 bp, Artificial Sequence
  Synthetic Sequence
aaacaacaga

SEQ ID NO: 2804 - DNA, 10 bp, Artificial Sequence
  Synthetic Sequence
gacgttaaag

SEQ ID NO: 2805 - DNA, 10 bp, Artificial Sequence
  Synthetic Sequence
accttgttaa

SEQ ID NO: 2806 - DNA, 10 bp, Artificial Sequence
  Synthetic Sequence
ctctcacttg

SEQ ID NO: 2807 - DNA, 10 bp, Artificial Sequence
  Synthetic Sequence
tacggcaaag

SEQ ID NO: 2808 - DNA, 10 bp, Artificial Sequence
  Synthetic Sequence
gaaggaaacg

SEQ ID NO: 2809 - DNA, 10 bp, Artificial Sequence
  Synthetic Sequence
cgccgtgtgt

SEQ ID NO: 2810 - DNA, 10 bp, Artificial Sequence
  Synthetic Sequence
atacgctcgt

SEQ ID NO: 2811 - DNA, 10 bp, Artificial Sequence
  Synthetic Sequence
agcccggagt

SEQ ID NO: 2812 - DNA, 10 bp, Artificial Sequence
  Synthetic Sequence
tggaatcacc

SEQ ID NO: 2813 - DNA, 10 bp, Artificial Sequence
  Synthetic Sequence
ccattcattt

SEQ ID NO: 2814 - DNA, 10 bp, Artificial Sequence
  Synthetic Sequence
tcttgttcgg

SEQ ID NO: 2815 - DNA, 10 bp, Artificial Sequence
  Synthetic Sequence
attgaaaggt

SEQ ID NO: 2816 - DNA, 10 bp, Artificial Sequence
  Synthetic Sequence
tacaagatat

SEQ ID NO: 2817 - DNA, 10 bp, Artificial Sequence
  Synthetic Sequence
aaacctgttg

SEQ ID NO: 2818 - DNA, 10 bp, Artificial Sequence
  Synthetic Sequence
ccactgcata

SEQ ID NO: 2819 - DNA, 10 bp, Artificial Sequence
  Synthetic Sequence
gaagacacgc

SEQ ID NO: 2820 - DNA, 10 bp, Artificial Sequence
  Synthetic Sequence
cattccggta

SEQ ID NO: 2821 - DNA, 10 bp, Artificial Sequence
  Synthetic Sequence
caattaaaga

SEQ ID NO: 2822 - DNA, 10 bp, Artificial Sequence
  Synthetic Sequence
atcttacaag

SEQ ID NO: 2823 - DNA, 10 bp, Artificial Sequence
  Synthetic Sequence
gagcccactt

SEQ ID NO: 2824 - DNA, 10 bp, Artificial Sequence
  Synthetic Sequence
taatgacaac

SEQ ID NO: 2825 - DNA, 10 bp, Artificial Sequence
  Synthetic Sequence
cgacactact

SEQ ID NO: 2826 - DNA, 10 bp, Artificial Sequence
  Synthetic Sequence
atgggtggtt

SEQ ID NO: 2827 - DNA, 10 bp, Artificial Sequence
  Synthetic Sequence
tactaggtaa

SEQ ID NO: 2828 - DNA, 10 bp, Artificial Sequence
  Synthetic Sequence
gatcgttagt

SEQ ID NO: 2829 - DNA, 10 bp, Artificial Sequence
  Synthetic Sequence
ctaaagcgcc

SEQ ID NO: 2830 - DNA, 10 bp, Artificial Sequence
  Synthetic Sequence
tgtgacattg

SEQ ID NO: 2831 - DNA, 10 bp, Artificial Sequence
  Synthetic Sequence
gattccacta

SEQ ID NO: 2832 - DNA, 10 bp, Artificial Sequence
  Synthetic Sequence
ggaattctgc

SEQ ID NO: 2833 - DNA, 10 bp, Artificial Sequence
  Synthetic Sequence
aagtgaggac

SEQ ID NO: 2834 - DNA, 10 bp, Artificial Sequence
  Synthetic Sequence
gataacgtaa

SEQ ID NO: 2835 - DNA, 10 bp, Artificial Sequence
  Synthetic Sequence
cggcatacct

SEQ ID NO: 2836 - DNA, 10 bp, Artificial Sequence
  Synthetic Sequence
cgcgtcaagt

SEQ ID NO: 2837 - DNA, 10 bp, Artificial Sequence
  Synthetic Sequence
ttcgggcctc

SEQ ID NO: 2838 - DNA, 10 bp, Artificial Sequence
  Synthetic Sequence
ctcgaaagta

SEQ ID NO: 2839 - DNA, 10 bp, Artificial Sequence
  Synthetic Sequence
tctttgctgc

SEQ ID NO: 2840 - DNA, 10 bp, Artificial Sequence
  Synthetic Sequence
aggttgtaat

SEQ ID NO: 2841 - DNA, 10 bp, Artificial Sequence
  Synthetic Sequence
gtcctatgat

SEQ ID NO: 2842 - DNA, 10 bp, Artificial Sequence
  Synthetic Sequence
gatgattata

SEQ ID NO: 2843 - DNA, 10 bp, Artificial Sequence
  Synthetic Sequence
agtcacccgg

SEQ ID NO: 2844 - DNA, 10 bp, Artificial Sequence
  Synthetic Sequence
tcggctagtt

SEQ ID NO: 2845 - DNA, 10 bp, Artificial Sequence
  Synthetic Sequence
gtaaacataa

SEQ ID NO: 2846 - DNA, 10 bp, Artificial Sequence
  Synthetic Sequence
atacgcgaat

SEQ ID NO: 2847 - DNA, 10 bp, Artificial Sequence
  Synthetic Sequence
actgtatctc

SEQ ID NO: 2848 - DNA, 10 bp, Artificial Sequence
  Synthetic Sequence
tcgcagagga

SEQ ID NO: 2849 - DNA, 10 bp, Artificial Sequence
  Synthetic Sequence
tttagcacac

SEQ ID NO: 2850 - DNA, 10 bp, Artificial Sequence
  Synthetic Sequence
tttgttgcta

SEQ ID NO: 2851 - DNA, 10 bp, Artificial Sequence
  Synthetic Sequence
cctcaggtca

SEQ ID NO: 2852 - DNA, 10 bp, Artificial Sequence
  Synthetic Sequence
tatacaggtg

SEQ ID NO: 2853 - DNA, 10 bp, Artificial Sequence
  Synthetic Sequence
gtataaccca

SEQ ID NO: 2854 - DNA, 10 bp, Artificial Sequence
  Synthetic Sequence
cacaaatcca

SEQ ID NO: 2855 - DNA, 10 bp, Artificial Sequence
  Synthetic Sequence
agtctttata

SEQ ID NO: 2856 - DNA, 10 bp, Artificial Sequence
  Synthetic Sequence
ggctggaaca

SEQ ID NO: 2857 - DNA, 10 bp, Artificial Sequence
  Synthetic Sequence
gtaagaagcg

SEQ ID NO: 2858 - DNA, 10 bp, Artificial Sequence
  Synthetic Sequence
ggtttggata

SEQ ID NO: 2859 - DNA, 10 bp, Artificial Sequence
  Synthetic Sequence
gattcttaga

SEQ ID NO: 2860 - DNA, 10 bp, Artificial Sequence
  Synthetic Sequence
atctaagtac

SEQ ID NO: 2861 - DNA, 10 bp, Artificial Sequence
  Synthetic Sequence
aggatctggc

SEQ ID NO: 2862 - DNA, 10 bp, Artificial Sequence
  Synthetic Sequence
cggaagttta

SEQ ID NO: 2863 - DNA, 10 bp, Artificial Sequence
  Synthetic Sequence
aactccgacc

SEQ ID NO: 2864 - DNA, 10 bp, Artificial Sequence
  Synthetic Sequence
tcggccctac

SEQ ID NO: 2865 - DNA, 10 bp, Artificial Sequence
  Synthetic Sequence
gtctttcgcc

SEQ ID NO: 2866 - DNA, 10 bp, Artificial Sequence
  Synthetic Sequence
gctcctaccc

SEQ ID NO: 2867 - DNA, 10 bp, Artificial Sequence
  Synthetic Sequence
gcgagtcaaa

SEQ ID NO: 2868 - DNA, 10 bp, Artificial Sequence
  Synthetic Sequence
tatacttgcg

SEQ ID NO: 2869 - DNA, 10 bp, Artificial Sequence
  Synthetic Sequence
gctatcgtca

SEQ ID NO: 2870 - DNA, 10 bp, Artificial Sequence
  Synthetic Sequence
ggcgattcac

SEQ ID NO: 2871 - DNA, 10 bp, Artificial Sequence
  Synthetic Sequence
attgtattcg

SEQ ID NO: 2872 - DNA, 10 bp, Artificial Sequence
  Synthetic Sequence
taacgctcat

SEQ ID NO: 2873 - DNA, 10 bp, Artificial Sequence
  Synthetic Sequence
gccgctgcaa

SEQ ID NO: 2874 - DNA, 10 bp, Artificial Sequence
  Synthetic Sequence
caactgccac

SEQ ID NO: 2875 - DNA, 10 bp, Artificial Sequence
  Synthetic Sequence
ccctgctgaa

SEQ ID NO: 2876 - DNA, 10 bp, Artificial Sequence
  Synthetic Sequence
gcaatcaacg

SEQ ID NO: 2877 - DNA, 10 bp, Artificial Sequence
  Synthetic Sequence
cacttggcag

SEQ ID NO: 2878 - DNA, 10 bp, Artificial Sequence
  Synthetic Sequence
cgtcgcttac

SEQ ID NO: 2879 - DNA, 10 bp, Artificial Sequence
  Synthetic Sequence
cgcgcatcca

SEQ ID NO: 2880 - DNA, 10 bp, Artificial Sequence
  Synthetic Sequence
ctggtttctt

SEQ ID NO: 2881 - DNA, 10 bp, Artificial Sequence
  Synthetic Sequence
agttacacga

SEQ ID NO: 2882 - DNA, 10 bp, Artificial Sequence
  Synthetic Sequence
tgtgatggcc

SEQ ID NO: 2883 - DNA, 10 bp, Artificial Sequence
  Synthetic Sequence
cactatccgg

SEQ ID NO: 2884 - DNA, 10 bp, Artificial Sequence
  Synthetic Sequence
tattgttaca

SEQ ID NO: 2885 - DNA, 10 bp, Artificial Sequence
  Synthetic Sequence
gaccaaagag

SEQ ID NO: 2886 - DNA, 10 bp, Artificial Sequence
  Synthetic Sequence
catgacttct

SEQ ID NO: 2887 - DNA, 10 bp, Artificial Sequence
  Synthetic Sequence
tggtcaatcc

SEQ ID NO: 2888 - DNA, 10 bp, Artificial Sequence
  Synthetic Sequence
gttgttgtaa

SEQ ID NO: 2889 - DNA, 10 bp, Artificial Sequence
  Synthetic Sequence
ctcagacggg

SEQ ID NO: 2890 - DNA, 10 bp, Artificial Sequence
  Synthetic Sequence
tagctcctgc

SEQ ID NO: 2891 - DNA, 10 bp, Artificial Sequence
  Synthetic Sequence
aagtggcaaa

SEQ ID NO: 2892 - DNA, 10 bp, Artificial Sequence
  Synthetic Sequence
tgggtgggtg

SEQ ID NO: 2893 - DNA, 10 bp, Artificial Sequence
  Synthetic Sequence
gacatattct

SEQ ID NO: 2894 - DNA, 10 bp, Artificial Sequence
  Synthetic Sequence
aaccaagatc

SEQ ID NO: 2895 - DNA, 10 bp, Artificial Sequence
  Synthetic Sequence
ttgttacggt

SEQ ID NO: 2896 - DNA, 10 bp, Artificial Sequence
  Synthetic Sequence
agcgagaact

SEQ ID NO: 2897 - DNA, 10 bp, Artificial Sequence
  Synthetic Sequence
ttcttcctgt

SEQ ID NO: 2898 - DNA, 10 bp, Artificial Sequence
  Synthetic Sequence
gtacgccgtg

SEQ ID NO: 2899 - DNA, 10 bp, Artificial Sequence
  Synthetic Sequence
tagtattcgc

SEQ ID NO: 2900 - DNA, 10 bp, Artificial Sequence
  Synthetic Sequence
gtttaacctt

SEQ ID NO: 2901 - DNA, 10 bp, Artificial Sequence
  Synthetic Sequence
tgtgcgaaat

SEQ ID NO: 2902 - DNA, 10 bp, Artificial Sequence
  Synthetic Sequence
aaatactcta

SEQ ID NO: 2903 - DNA, 10 bp, Artificial Sequence
  Synthetic Sequence
gcaactcggc

SEQ ID NO: 2904 - DNA, 10 bp, Artificial Sequence
  Synthetic Sequence
taataagtta

SEQ ID NO: 2905 - DNA, 10 bp, Artificial Sequence
  Synthetic Sequence
gtcagactct

SEQ ID NO: 2906 - DNA, 10 bp, Artificial Sequence
  Synthetic Sequence
tctcaccacc

SEQ ID NO: 2907 - DNA, 10 bp, Artificial Sequence
  Synthetic Sequence
ggtaagcatc

SEQ ID NO: 2908 - DNA, 10 bp, Artificial Sequence
  Synthetic Sequence
gcggcataga

SEQ ID NO: 2909 - DNA, 10 bp, Artificial Sequence
  Synthetic Sequence
gaaagcggat

SEQ ID NO: 2910 - DNA, 10 bp, Artificial Sequence
  Synthetic Sequence
cgccattcgg

SEQ ID NO: 2911 - DNA, 10 bp, Artificial Sequence
  Synthetic Sequence
ccgagcactc

SEQ ID NO: 2912 - DNA, 10 bp, Artificial Sequence
  Synthetic Sequence
ccggatcctg

SEQ ID NO: 2913 - DNA, 10 bp, Artificial Sequence
  Synthetic Sequence
gccacaacca

SEQ ID NO: 2914 - DNA, 10 bp, Artificial Sequence
  Synthetic Sequence
caatttgttg

SEQ ID NO: 2915 - DNA, 10 bp, Artificial Sequence
  Synthetic Sequence
gtgagtcact

SEQ ID NO: 2916 - DNA, 10 bp, Artificial Sequence
  Synthetic Sequence
tgagggcgaa

SEQ ID NO: 2917 - DNA, 10 bp, Artificial Sequence
  Synthetic Sequence
agtgctgccc

SEQ ID NO: 2918 - DNA, 10 bp, Artificial Sequence
  Synthetic Sequence
acaattcagg

SEQ ID NO: 2919 - DNA, 10 bp, Artificial Sequence
  Synthetic Sequence
tattattatg

SEQ ID NO: 2920 - DNA, 10 bp, Artificial Sequence
  Synthetic Sequence
atagagaagg

SEQ ID NO: 2921 - DNA, 10 bp, Artificial Sequence
  Synthetic Sequence
ttgcgaattt

SEQ ID NO: 2922 - DNA, 10 bp, Artificial Sequence
  Synthetic Sequence
tcctcctgat

SEQ ID NO: 2923 - DNA, 10 bp, Artificial Sequence
  Synthetic Sequence
ctgctttgac

SEQ ID NO: 2924 - DNA, 10 bp, Artificial Sequence
  Synthetic Sequence
gtgtctgccg

SEQ ID NO: 2925 - DNA, 10 bp, Artificial Sequence
  Synthetic Sequence
tccatgctcg

SEQ ID NO: 2926 - DNA, 10 bp, Artificial Sequence
  Synthetic Sequence
tgctctgttt

SEQ ID NO: 2927 - DNA, 10 bp, Artificial Sequence
  Synthetic Sequence
tcctgtgcta

SEQ ID NO: 2928 - DNA, 10 bp, Artificial Sequence
  Synthetic Sequence
ttgcggcctg

SEQ ID NO: 2929 - DNA, 10 bp, Artificial Sequence
  Synthetic Sequence
ttatatcatt

SEQ ID NO: 2930 - DNA, 10 bp, Artificial Sequence
  Synthetic Sequence
cgaccattcg

SEQ ID NO: 2931 - DNA, 10 bp, Artificial Sequence
  Synthetic Sequence
gtctccgtcg

SEQ ID NO: 2932 - DNA, 10 bp, Artificial Sequence
  Synthetic Sequence
ctaaagactc

SEQ ID NO: 2933 - DNA, 10 bp, Artificial Sequence
  Synthetic Sequence
catcggatta

SEQ ID NO: 2934 - DNA, 10 bp, Artificial Sequence
  Synthetic Sequence
tgattattac

SEQ ID NO: 2935 - DNA, 10 bp, Artificial Sequence
  Synthetic Sequence
gagctttgtg

SEQ ID NO: 2936 - DNA, 10 bp, Artificial Sequence
  Synthetic Sequence
aaccggttgg

SEQ ID NO: 2937 - DNA, 10 bp, Artificial Sequence
  Synthetic Sequence
caatggccgg

SEQ ID NO: 2938 - DNA, 10 bp, Artificial Sequence
  Synthetic Sequence
accaacttac

SEQ ID NO: 2939 - DNA, 10 bp, Artificial Sequence
  Synthetic Sequence
ccattgctcg

SEQ ID NO: 2940 - DNA, 10 bp, Artificial Sequence
  Synthetic Sequence
ctcgggaaac

SEQ ID NO: 2941 - DNA, 10 bp, Artificial Sequence
  Synthetic Sequence
gacaacaatg

SEQ ID NO: 2942 - DNA, 10 bp, Artificial Sequence
  Synthetic Sequence
cgaaagctca

SEQ ID NO: 2943 - DNA, 10 bp, Artificial Sequence
  Synthetic Sequence
taagctatga

SEQ ID NO: 2944 - DNA, 10 bp, Artificial Sequence
  Synthetic Sequence
acagtcatga

SEQ ID NO: 2945 - DNA, 10 bp, Artificial Sequence
  Synthetic Sequence
actgcgaaca

SEQ ID NO: 2946 - DNA, 10 bp, Artificial Sequence
  Synthetic Sequence
gaaaggcctg

SEQ ID NO: 2947 - DNA, 10 bp, Artificial Sequence
  Synthetic Sequence
tttccttcgg

SEQ ID NO: 2948 - DNA, 10 bp, Artificial Sequence
  Synthetic Sequence
ttattatctc

SEQ ID NO: 2949 - DNA, 10 bp, Artificial Sequence
  Synthetic Sequence
ggattcatta

SEQ ID NO: 2950 - DNA, 10 bp, Artificial Sequence
  Synthetic Sequence
atgaatacag

SEQ ID NO: 2951 - DNA, 10 bp, Artificial Sequence
  Synthetic Sequence
caggagtttg

SEQ ID NO: 2952 - DNA, 10 bp, Artificial Sequence
  Synthetic Sequence
tagaaagctg

SEQ ID NO: 2953 - DNA, 10 bp, Artificial Sequence
  Synthetic Sequence
ctaccttcac

SEQ ID NO: 2954 - DNA, 10 bp, Artificial Sequence
  Synthetic Sequence
tttggctctg

SEQ ID NO: 2955 - DNA, 10 bp, Artificial Sequence
  Synthetic Sequence
agtctgttgc

SEQ ID NO: 2956 - DNA, 10 bp, Artificial Sequence
  Synthetic Sequence
ttactaactg

SEQ ID NO: 2957 - DNA, 10 bp, Artificial Sequence
  Synthetic Sequence
tatgatggag

SEQ ID NO: 2958 - DNA, 10 bp, Artificial Sequence
  Synthetic Sequence
aaacggattg

SEQ ID NO: 2959 - DNA, 10 bp, Artificial Sequence
  Synthetic Sequence
cctgctttcc

SEQ ID NO: 2960 - DNA, 10 bp, Artificial Sequence
  Synthetic Sequence
cgccgaacag

SEQ ID NO: 2961 - DNA, 10 bp, Artificial Sequence
  Synthetic Sequence
gggattacaa

SEQ ID NO: 2962 - DNA, 10 bp, Artificial Sequence
  Synthetic Sequence
taatgggcgt

SEQ ID NO: 2963 - DNA, 10 bp, Artificial Sequence
  Synthetic Sequence
ctggctacgc

SEQ ID NO: 2964 - DNA, 10 bp, Artificial Sequence
  Synthetic Sequence
accgtaagca

SEQ ID NO: 2965 - DNA, 10 bp, Artificial Sequence
  Synthetic Sequence
ctttaatatt

SEQ ID NO: 2966 - DNA, 10 bp, Artificial Sequence
  Synthetic Sequence
ggcactaaat

SEQ ID NO: 2967 - DNA, 10 bp, Artificial Sequence
  Synthetic Sequence
ttcctgttgt

SEQ ID NO: 2968 - DNA, 10 bp, Artificial Sequence
  Synthetic Sequence
tgcccattag

SEQ ID NO: 2969 - DNA, 10 bp, Artificial Sequence
  Synthetic Sequence
actaaccttc

SEQ ID NO: 2970 - DNA, 10 bp, Artificial Sequence
  Synthetic Sequence
gaagtgccgt

SEQ ID NO: 2971 - DNA, 10 bp, Artificial Sequence
  Synthetic Sequence
gaaccgggca

SEQ ID NO: 2972 - DNA, 10 bp, Artificial Sequence
  Synthetic Sequence
cttctatcaa

SEQ ID NO: 2973 - DNA, 10 bp, Artificial Sequence
  Synthetic Sequence
cttaggagga

SEQ ID NO: 2974 - DNA, 10 bp, Artificial Sequence
  Synthetic Sequence
gactcgacgt

SEQ ID NO: 2975 - DNA, 10 bp, Artificial Sequence
  Synthetic Sequence
tcttgctcac

SEQ ID NO: 2976 - DNA, 10 bp, Artificial Sequence
  Synthetic Sequence
ggtcagtttg

SEQ ID NO: 2977 - DNA, 10 bp, Artificial Sequence
  Synthetic Sequence
atgtgaaaga

SEQ ID NO: 2978 - DNA, 10 bp, Artificial Sequence
  Synthetic Sequence
gcacggtacc

SEQ ID NO: 2979 - DNA, 10 bp, Artificial Sequence
  Synthetic Sequence
agtgatcatg

SEQ ID NO: 2980 - DNA, 10 bp, Artificial Sequence
  Synthetic Sequence
ctataccact

SEQ ID NO: 2981 - DNA, 10 bp, Artificial Sequence
  Synthetic Sequence
tgcggaacga

SEQ ID NO: 2982 - DNA, 10 bp, Artificial Sequence
  Synthetic Sequence
gttatcaagt

SEQ ID NO: 2983 - DNA, 10 bp, Artificial Sequence
  Synthetic Sequence
ttagcgagga

SEQ ID NO: 2984 - DNA, 10 bp, Artificial Sequence
  Synthetic Sequence
gtgccactgc

SEQ ID NO: 2985 - DNA, 10 bp, Artificial Sequence
  Synthetic Sequence
gggtaggcat

SEQ ID NO: 2986 - DNA, 10 bp, Artificial Sequence
  Synthetic Sequence
acgcgcactt

SEQ ID NO: 2987 - DNA, 10 bp, Artificial Sequence
  Synthetic Sequence
atggccaata

SEQ ID NO: 2988 - DNA, 10 bp, Artificial Sequence
  Synthetic Sequence
cgtctcgttt

SEQ ID NO: 2989 - DNA, 10 bp, Artificial Sequence
  Synthetic Sequence
ggttcaaagc

SEQ ID NO: 2990 - DNA, 10 bp, Artificial Sequence
  Synthetic Sequence
acgagtgctg

SEQ ID NO: 2991 - DNA, 10 bp, Artificial Sequence
  Synthetic Sequence
ctgtcggata

SEQ ID NO: 2992 - DNA, 10 bp, Artificial Sequence
  Synthetic Sequence
ccctaagatc

SEQ ID NO: 2993 - DNA, 10 bp, Artificial Sequence
  Synthetic Sequence
gtaaacctgc

SEQ ID NO: 2994 - DNA, 10 bp, Artificial Sequence
  Synthetic Sequence
gtgtcaagaa

SEQ ID NO: 2995 - DNA, 10 bp, Artificial Sequence
  Synthetic Sequence
tacggagcta

SEQ ID NO: 2996 - DNA, 10 bp, Artificial Sequence
  Synthetic Sequence
cttatgtgag

SEQ ID NO: 2997 - DNA, 10 bp, Artificial Sequence
  Synthetic Sequence
gacgggaagc

SEQ ID NO: 2998 - DNA, 10 bp, Artificial Sequence
  Synthetic Sequence
tatactatta

SEQ ID NO: 2999 - DNA, 10 bp, Artificial Sequence
  Synthetic Sequence
actagcctct

SEQ ID NO: 3000 - DNA, 10 bp, Artificial Sequence
  Synthetic Sequence
aacttccggt

SEQ ID NO: 3001 - DNA, 10 bp, Artificial Sequence
  Synthetic Sequence
gtccaccttg

SEQ ID NO: 3002 - DNA, 10 bp, Artificial Sequence
  Synthetic Sequence
tgtttcactc

SEQ ID NO: 3003 - DNA, 10 bp, Artificial Sequence
  Synthetic Sequence
ttggtgaggc

SEQ ID NO: 3004 - DNA, 10 bp, Artificial Sequence
  Synthetic Sequence
acctccctag

SEQ ID NO: 3005 - DNA, 10 bp, Artificial Sequence
  Synthetic Sequence
tccgtctaaa

SEQ ID NO: 3006 - DNA, 10 bp, Artificial Sequence
  Synthetic Sequence
ggcgcactta

SEQ ID NO: 3007 - DNA, 10 bp, Artificial Sequence
  Synthetic Sequence
ccttgctctt

SEQ ID NO: 3008 - DNA, 10 bp, Artificial Sequence
  Synthetic Sequence
tgcgagggaa

SEQ ID NO: 3009 - DNA, 10 bp, Artificial Sequence
  Synthetic Sequence
aatttcgcgc

SEQ ID NO: 3010 - DNA, 10 bp, Artificial Sequence
  Synthetic Sequence
tcatcgatcc

SEQ ID NO: 3011 - DNA, 10 bp, Artificial Sequence
  Synthetic Sequence
caacatagga

SEQ ID NO: 3012 - DNA, 10 bp, Artificial Sequence
  Synthetic Sequence
tccaagtgtg

SEQ ID NO: 3013 - DNA, 10 bp, Artificial Sequence
  Synthetic Sequence
aggaggcact

SEQ ID NO: 3014 - DNA, 10 bp, Artificial Sequence
  Synthetic Sequence
tcgacgacga

SEQ ID NO: 3015 - DNA, 10 bp, Artificial Sequence
  Synthetic Sequence
tctaacgttg

SEQ ID NO: 3016 - DNA, 10 bp, Artificial Sequence
  Synthetic Sequence
gtacaatcaa

SEQ ID NO: 3017 - DNA, 10 bp, Artificial Sequence
  Synthetic Sequence
tatacgacac

SEQ ID NO: 3018 - DNA, 10 bp, Artificial Sequence
  Synthetic Sequence
gcgaacgatg

SEQ ID NO: 3019 - DNA, 10 bp, Artificial Sequence
  Synthetic Sequence
cgccaagtct

SEQ ID NO: 3020 - DNA, 10 bp, Artificial Sequence
  Synthetic Sequence
gtgcatagca

SEQ ID NO: 3021 - DNA, 10 bp, Artificial Sequence
  Synthetic Sequence
cggatagcgg

SEQ ID NO: 3022 - DNA, 10 bp, Artificial Sequence
  Synthetic Sequence
tttaaagcaa

SEQ ID NO: 3023 - DNA, 10 bp, Artificial Sequence
  Synthetic Sequence
ctcatcattc

SEQ ID NO: 3024 - DNA, 10 bp, Artificial Sequence
  Synthetic Sequence
gccggacatc

SEQ ID NO: 3025 - DNA, 10 bp, Artificial Sequence
  Synthetic Sequence
cactttcagc

SEQ ID NO: 3026 - DNA, 10 bp, Artificial Sequence
  Synthetic Sequence
atgtcatagc

SEQ ID NO: 3027 - DNA, 10 bp, Artificial Sequence
  Synthetic Sequence
ctagcgcctc

SEQ ID NO: 3028 - DNA, 10 bp, Artificial Sequence
  Synthetic Sequence
tagtaagcgt

SEQ ID NO: 3029 - DNA, 10 bp, Artificial Sequence
  Synthetic Sequence
tccacgtggt

SEQ ID NO: 3030 - DNA, 10 bp, Artificial Sequence
  Synthetic Sequence
ttacaattcg

SEQ ID NO: 3031 - DNA, 10 bp, Artificial Sequence
  Synthetic Sequence
catgtaacag

SEQ ID NO: 3032 - DNA, 10 bp, Artificial Sequence
  Synthetic Sequence
ccaagaccgt

SEQ ID NO: 3033 - DNA, 10 bp, Artificial Sequence
  Synthetic Sequence
caagtgtttc

SEQ ID NO: 3034 - DNA, 10 bp, Artificial Sequence
  Synthetic Sequence
ggagaaccgc

SEQ ID NO: 3035 - DNA, 10 bp, Artificial Sequence
  Synthetic Sequence
agtgctttac

SEQ ID NO: 3036 - DNA, 10 bp, Artificial Sequence
  Synthetic Sequence
tttcttggtc

SEQ ID NO: 3037 - DNA, 10 bp, Artificial Sequence
  Synthetic Sequence
tggagaccca

SEQ ID NO: 3038 - DNA, 10 bp, Artificial Sequence
  Synthetic Sequence
ggctagcacc

SEQ ID NO: 3039 - DNA, 10 bp, Artificial Sequence
  Synthetic Sequence
cgcacttcta

SEQ ID NO: 3040 - DNA, 10 bp, Artificial Sequence
  Synthetic Sequence
tcagacaacg

SEQ ID NO: 3041 - DNA, 10 bp, Artificial Sequence
  Synthetic Sequence
gcactctgcg

SEQ ID NO: 3042 - DNA, 10 bp, Artificial Sequence
  Synthetic Sequence
gctcgacctt

SEQ ID NO: 3043 - DNA, 10 bp, Artificial Sequence
  Synthetic Sequence
tgattgcctc

SEQ ID NO: 3044 - DNA, 10 bp, Artificial Sequence
  Synthetic Sequence
cggacgaagg

SEQ ID NO: 3045 - DNA, 10 bp, Artificial Sequence
  Synthetic Sequence
atccaatcat

SEQ ID NO: 3046 - DNA, 10 bp, Artificial Sequence
  Synthetic Sequence
tactaactac

SEQ ID NO: 3047 - DNA, 10 bp, Artificial Sequence
  Synthetic Sequence
acagcagaat

SEQ ID NO: 3048 - DNA, 10 bp, Artificial Sequence
  Synthetic Sequence
gcaggccaga

SEQ ID NO: 3049 - DNA, 10 bp, Artificial Sequence
  Synthetic Sequence
tcatgtcctt

SEQ ID NO: 3050 - DNA, 10 bp, Artificial Sequence
  Synthetic Sequence
ctaagcgagt

SEQ ID NO: 3051 - DNA, 10 bp, Artificial Sequence
  Synthetic Sequence
gttcatgagt

SEQ ID NO: 3052 - DNA, 10 bp, Artificial Sequence
  Synthetic Sequence
taggacgacg

SEQ ID NO: 3053 - DNA, 10 bp, Artificial Sequence
  Synthetic Sequence
cccttgagtc

SEQ ID NO: 3054 - DNA, 10 bp, Artificial Sequence
  Synthetic Sequence
gcaagaaatc

SEQ ID NO: 3055 - DNA, 10 bp, Artificial Sequence
  Synthetic Sequence
tatctcgaga

SEQ ID NO: 3056 - DNA, 10 bp, Artificial Sequence
  Synthetic Sequence
ttgatacacc

SEQ ID NO: 3057 - DNA, 10 bp, Artificial Sequence
  Synthetic Sequence
acttgacgtt

SEQ ID NO: 3058 - DNA, 10 bp, Artificial Sequence
  Synthetic Sequence
ggactcaaag

SEQ ID NO: 3059 - DNA, 10 bp, Artificial Sequence
  Synthetic Sequence
gtcagtgcct

SEQ ID NO: 3060 - DNA, 10 bp, Artificial Sequence
  Synthetic Sequence
ttctgaactg

SEQ ID NO: 3061 - DNA, 10 bp, Artificial Sequence
  Synthetic Sequence
gatcactcct

SEQ ID NO: 3062 - DNA, 10 bp, Artificial Sequence
  Synthetic Sequence
ggtgggatat

SEQ ID NO: 3063 - DNA, 10 bp, Artificial Sequence
  Synthetic Sequence
cgtgaggagc

SEQ ID NO: 3064 - DNA, 10 bp, Artificial Sequence
  Synthetic Sequence
tctaatcgcc

SEQ ID NO: 3065 - DNA, 10 bp, Artificial Sequence
  Synthetic Sequence
ggcgttctag

SEQ ID NO: 3066 - DNA, 10 bp, Artificial Sequence
  Synthetic Sequence
atttcatctc

SEQ ID NO: 3067 - DNA, 10 bp, Artificial Sequence
  Synthetic Sequence
tacccgccct

SEQ ID NO: 3068 - DNA, 10 bp, Artificial Sequence
  Synthetic Sequence
gggtaacata

SEQ ID NO: 3069 - DNA, 10 bp, Artificial Sequence
  Synthetic Sequence
atctcctaat

SEQ ID NO: 3070 - DNA, 10 bp, Artificial Sequence
  Synthetic Sequence
gcactgggac

SEQ ID NO: 3071 - DNA, 10 bp, Artificial Sequence
  Synthetic Sequence
ttcgcatcga

SEQ ID NO: 3072 - DNA, 10 bp, Artificial Sequence
  Synthetic Sequence
atgcggttcg

SEQ ID NO: 3073 - DNA, 10 bp, Artificial Sequence
  Synthetic Sequence
caacagtgcc

SEQ ID NO: 3074 - DNA, 10 bp, Artificial Sequence
  Synthetic Sequence
gtcacgatct

SEQ ID NO: 3075 - DNA, 10 bp, Artificial Sequence
  Synthetic Sequence
ccgctaccga

SEQ ID NO: 3076 - DNA, 10 bp, Artificial Sequence
  Synthetic Sequence
gacaatgtcg

SEQ ID NO: 3077 - DNA, 10 bp, Artificial Sequence
  Synthetic Sequence
ttgggaaagg

SEQ ID NO: 3078 - DNA, 10 bp, Artificial Sequence
  Synthetic Sequence
gacgcgcctt

SEQ ID NO: 3079 - DNA, 10 bp, Artificial Sequence
  Synthetic Sequence
ctcgtgccag

SEQ ID NO: 3080 - DNA, 10 bp, Artificial Sequence
  Synthetic Sequence
gcgtacttaa

SEQ ID NO: 3081 - DNA, 10 bp, Artificial Sequence
  Synthetic Sequence
ctcttagaaa

SEQ ID NO: 3082 - DNA, 10 bp, Artificial Sequence
  Synthetic Sequence
acgtagcctc

SEQ ID NO: 3083 - DNA, 10 bp, Artificial Sequence
  Synthetic Sequence
acgatcagac

SEQ ID NO: 3084 - DNA, 10 bp, Artificial Sequence
  Synthetic Sequence
gcacgaagac

SEQ ID NO: 3085 - DNA, 10 bp, Artificial Sequence
  Synthetic Sequence
agctcattac

SEQ ID NO: 3086 - DNA, 10 bp, Artificial Sequence
  Synthetic Sequence
gatgcgtacg

SEQ ID NO: 3087 - DNA, 10 bp, Artificial Sequence
  Synthetic Sequence
ttgcatattc

SEQ ID NO: 3088 - DNA, 10 bp, Artificial Sequence
  Synthetic Sequence
tgtagagggc

SEQ ID NO: 3089 - DNA, 10 bp, Artificial Sequence
  Synthetic Sequence
atactcgcaa

SEQ ID NO: 3090 - DNA, 10 bp, Artificial Sequence
  Synthetic Sequence
gtaagatctt

SEQ ID NO: 3091 - DNA, 10 bp, Artificial Sequence
  Synthetic Sequence
agatagccgg

SEQ ID NO: 3092 - DNA, 10 bp, Artificial Sequence
  Synthetic Sequence
agcggatatt

SEQ ID NO: 3093 - DNA, 10 bp, Artificial Sequence
  Synthetic Sequence
taagtcgatt

SEQ ID NO: 3094 - DNA, 10 bp, Artificial Sequence
  Synthetic Sequence
aggcgaagca

SEQ ID NO: 3095 - DNA, 10 bp, Artificial Sequence
  Synthetic Sequence
ttgctcgagg

SEQ ID NO: 3096 - DNA, 10 bp, Artificial Sequence
  Synthetic Sequence
agctgcgggt

SEQ ID NO: 3097 - DNA, 10 bp, Artificial Sequence
  Synthetic Sequence
cgttcctatc

SEQ ID NO: 3098 - DNA, 10 bp, Artificial Sequence
  Synthetic Sequence
catgcgctgt

SEQ ID NO: 3099 - DNA, 10 bp, Artificial Sequence
  Synthetic Sequence
cttcggatag

SEQ ID NO: 3100 - DNA, 10 bp, Artificial Sequence
  Synthetic Sequence
aaagtaacgt

SEQ ID NO: 3101 - DNA, 10 bp, Artificial Sequence
  Synthetic Sequence
acggttggag

SEQ ID NO: 3102 - DNA, 10 bp, Artificial Sequence
  Synthetic Sequence
agccggtgat

SEQ ID NO: 3103 - DNA, 10 bp, Artificial Sequence
  Synthetic Sequence
agcccaaccc

SEQ ID NO: 3104 - DNA, 10 bp, Artificial Sequence
  Synthetic Sequence
ggttattatt

SEQ ID NO: 3105 - DNA, 10 bp, Artificial Sequence
  Synthetic Sequence
tgtatatagc

SEQ ID NO: 3106 - DNA, 10 bp, Artificial Sequence
  Synthetic Sequence
acttgtggcg

SEQ ID NO: 3107 - DNA, 10 bp, Artificial Sequence
  Synthetic Sequence
tgatcaagcg

SEQ ID NO: 3108 - DNA, 10 bp, Artificial Sequence
  Synthetic Sequence
taacggccca

SEQ ID NO: 3109 - DNA, 10 bp, Artificial Sequence
  Synthetic Sequence
tccttacccg

SEQ ID NO: 3110 - DNA, 10 bp, Artificial Sequence
  Synthetic Sequence
atcagtgaac

SEQ ID NO: 3111 - DNA, 10 bp, Artificial Sequence
  Synthetic Sequence
cacgtcgtac

SEQ ID NO: 3112 - DNA, 10 bp, Artificial Sequence
  Synthetic Sequence
agataccaaa

SEQ ID NO: 3113 - DNA, 10 bp, Artificial Sequence
  Synthetic Sequence
atataggagc

SEQ ID NO: 3114 - DNA, 10 bp, Artificial Sequence
  Synthetic Sequence
caaagtaatt

SEQ ID NO: 3115 - DNA, 10 bp, Artificial Sequence
  Synthetic Sequence
gagtatctac

SEQ ID NO: 3116 - DNA, 10 bp, Artificial Sequence
  Synthetic Sequence
atcaagagtc

SEQ ID NO: 3117 - DNA, 10 bp, Artificial Sequence
  Synthetic Sequence
gtccgcagga

SEQ ID NO: 3118 - DNA, 10 bp, Artificial Sequence
  Synthetic Sequence
aaaggagttg

SEQ ID NO: 3119 - DNA, 10 bp, Artificial Sequence
  Synthetic Sequence
gcataactat

SEQ ID NO: 3120 - DNA, 10 bp, Artificial Sequence
  Synthetic Sequence
tagagaaact

SEQ ID NO: 3121 - DNA, 10 bp, Artificial Sequence
  Synthetic Sequence
agaatagggt

SEQ ID NO: 3122 - DNA, 10 bp, Artificial Sequence
  Synthetic Sequence
gtacatctct

SEQ ID NO: 3123 - DNA, 10 bp, Artificial Sequence
  Synthetic Sequence
gaggatactt

SEQ ID NO: 3124 - DNA, 10 bp, Artificial Sequence
  Synthetic Sequence
gtaaactacc

SEQ ID NO: 3125 - DNA, 10 bp, Artificial Sequence
  Synthetic Sequence
caacgcaact

SEQ ID NO: 3126 - DNA, 10 bp, Artificial Sequence
  Synthetic Sequence
ccaagacgag

SEQ ID NO: 3127 - DNA, 10 bp, Artificial Sequence
  Synthetic Sequence
atggatcgca

SEQ ID NO: 3128 - DNA, 10 bp, Artificial Sequence
  Synthetic Sequence
cgtcgcaatt

SEQ ID NO: 3129 - DNA, 10 bp, Artificial Sequence
  Synthetic Sequence
gccggtttaa

SEQ ID NO: 3130 - DNA, 10 bp, Artificial Sequence
  Synthetic Sequence
agacactcgc

SEQ ID NO: 3131 - DNA, 10 bp, Artificial Sequence
  Synthetic Sequence
gatgctaaca

SEQ ID NO: 3132 - DNA, 10 bp, Artificial Sequence
  Synthetic Sequence
ccagtcgtca

SEQ ID NO: 3133 - DNA, 10 bp, Artificial Sequence
  Synthetic Sequence
tgccgcagtg

SEQ ID NO: 3134 - DNA, 10 bp, Artificial Sequence
  Synthetic Sequence
acatttccca

SEQ ID NO: 3135 - DNA, 10 bp, Artificial Sequence
  Synthetic Sequence
gtgtggtaca

SEQ ID NO: 3136 - DNA, 10 bp, Artificial Sequence
  Synthetic Sequence
ctaagttatc

SEQ ID NO: 3137 - DNA, 10 bp, Artificial Sequence
  Synthetic Sequence
attaccttag

SEQ ID NO: 3138 - DNA, 10 bp, Artificial Sequence
  Synthetic Sequence
cactatagct

SEQ ID NO: 3139 - DNA, 10 bp, Artificial Sequence
  Synthetic Sequence
gcgagagttc

SEQ ID NO: 3140 - DNA, 10 bp, Artificial Sequence
  Synthetic Sequence
acctagggct

SEQ ID NO: 3141 - DNA, 10 bp, Artificial Sequence
  Synthetic Sequence
ttgttagccg

SEQ ID NO: 3142 - DNA, 10 bp, Artificial Sequence
  Synthetic Sequence
tgtgggtggt

SEQ ID NO: 3143 - DNA, 10 bp, Artificial Sequence
  Synthetic Sequence
gtggcacctt

SEQ ID NO: 3144 - DNA, 10 bp, Artificial Sequence
  Synthetic Sequence
cgggtgttgc

SEQ ID NO: 3145 - DNA, 10 bp, Artificial Sequence
  Synthetic Sequence
tatctaccct

SEQ ID NO: 3146 - DNA, 10 bp, Artificial Sequence
  Synthetic Sequence
ctaatagtgt

SEQ ID NO: 3147 - DNA, 10 bp, Artificial Sequence
  Synthetic Sequence
gtgccacaaa

SEQ ID NO: 3148 - DNA, 10 bp, Artificial Sequence
  Synthetic Sequence
gcgcgtctag

SEQ ID NO: 3149 - DNA, 10 bp, Artificial Sequence
  Synthetic Sequence
ttccgagccg

SEQ ID NO: 3150 - DNA, 10 bp, Artificial Sequence
  Synthetic Sequence
agaatgcggc

SEQ ID NO: 3151 - DNA, 10 bp, Artificial Sequence
  Synthetic Sequence
cctggatgac

SEQ ID NO: 3152 - DNA, 10 bp, Artificial Sequence
  Synthetic Sequence
tgaaccctat

SEQ ID NO: 3153 - DNA, 10 bp, Artificial Sequence
  Synthetic Sequence
actctcaacg

SEQ ID NO: 3154 - DNA, 10 bp, Artificial Sequence
  Synthetic Sequence
cctgcttgta

SEQ ID NO: 3155 - DNA, 10 bp, Artificial Sequence
  Synthetic Sequence
cctgcgcaat

SEQ ID NO: 3156 - DNA, 10 bp, Artificial Sequence
  Synthetic Sequence
tggtacagtt

SEQ ID NO: 3157 - DNA, 10 bp, Artificial Sequence
  Synthetic Sequence
gtttcccacg

SEQ ID NO: 3158 - DNA, 10 bp, Artificial Sequence
  Synthetic Sequence
gatctatcgt

SEQ ID NO: 3159 - DNA, 10 bp, Artificial Sequence
  Synthetic Sequence
ctactaaatc

SEQ ID NO: 3160 - DNA, 10 bp, Artificial Sequence
  Synthetic Sequence
cccgtgtcac

SEQ ID NO: 3161 - DNA, 10 bp, Artificial Sequence
  Synthetic Sequence
cgagtgccca

SEQ ID NO: 3162 - DNA, 10 bp, Artificial Sequence
  Synthetic Sequence
ctcctgaggt

SEQ ID NO: 3163 - DNA, 10 bp, Artificial Sequence
  Synthetic Sequence
ttccatttag

SEQ ID NO: 3164 - DNA, 10 bp, Artificial Sequence
  Synthetic Sequence
gaaggtcatg

SEQ ID NO: 3165 - DNA, 10 bp, Artificial Sequence
  Synthetic Sequence
taccggtctt

SEQ ID NO: 3166 - DNA, 10 bp, Artificial Sequence
  Synthetic Sequence
catttccgac

SEQ ID NO: 3167 - DNA, 10 bp, Artificial Sequence
  Synthetic Sequence
aattgggaat

SEQ ID NO: 3168 - DNA, 10 bp, Artificial Sequence
  Synthetic Sequence
ctatttgaat

SEQ ID NO: 3169 - DNA, 10 bp, Artificial Sequence
  Synthetic Sequence
cgggacaaag

SEQ ID NO: 3170 - DNA, 10 bp, Artificial Sequence
  Synthetic Sequence
taccattaac

SEQ ID NO: 3171 - DNA, 10 bp, Artificial Sequence
  Synthetic Sequence
ggaatacata

SEQ ID NO: 3172 - DNA, 10 bp, Artificial Sequence
  Synthetic Sequence
aactgtacga

SEQ ID NO: 3173 - DNA, 10 bp, Artificial Sequence
  Synthetic Sequence
aaccggaaat

SEQ ID NO: 3174 - DNA, 10 bp, Artificial Sequence
  Synthetic Sequence
ctccatcgac

SEQ ID NO: 3175 - DNA, 10 bp, Artificial Sequence
  Synthetic Sequence
agacgcataa

SEQ ID NO: 3176 - DNA, 10 bp, Artificial Sequence
  Synthetic Sequence
cagatatcgc

SEQ ID NO: 3177 - DNA, 10 bp, Artificial Sequence
  Synthetic Sequence
ctctttgttt

SEQ ID NO: 3178 - DNA, 10 bp, Artificial Sequence
  Synthetic Sequence
acgctgacca

SEQ ID NO: 3179 - DNA, 10 bp, Artificial Sequence
  Synthetic Sequence
gtcctttccg

SEQ ID NO: 3180 - DNA, 10 bp, Artificial Sequence
  Synthetic Sequence
tctgacggta

SEQ ID NO: 3181 - DNA, 10 bp, Artificial Sequence
  Synthetic Sequence
catcacgttg

SEQ ID NO: 3182 - DNA, 10 bp, Artificial Sequence
  Synthetic Sequence
tgaagtatac

SEQ ID NO: 3183 - DNA, 10 bp, Artificial Sequence
  Synthetic Sequence
tacgtggcgt

SEQ ID NO: 3184 - DNA, 10 bp, Artificial Sequence
  Synthetic Sequence
ccgctgttgg

SEQ ID NO: 3185 - DNA, 10 bp, Artificial Sequence
  Synthetic Sequence
atctctcaac

SEQ ID NO: 3186 - DNA, 10 bp, Artificial Sequence
  Synthetic Sequence
gtgggatgcg

SEQ ID NO: 3187 - DNA, 10 bp, Artificial Sequence
  Synthetic Sequence
atagcgttac

SEQ ID NO: 3188 - DNA, 10 bp, Artificial Sequence
  Synthetic Sequence
cgcacaacct

SEQ ID NO: 3189 - DNA, 10 bp, Artificial Sequence
  Synthetic Sequence
cgaccagctt

SEQ ID NO: 3190 - DNA, 10 bp, Artificial Sequence
  Synthetic Sequence
aatgttcgat

SEQ ID NO: 3191 - DNA, 10 bp, Artificial Sequence
  Synthetic Sequence
gatccctagc

SEQ ID NO: 3192 - DNA, 10 bp, Artificial Sequence
  Synthetic Sequence
ctgctgttca

SEQ ID NO: 3193 - DNA, 10 bp, Artificial Sequence
  Synthetic Sequence
ccaaactgat

SEQ ID NO: 3194 - DNA, 10 bp, Artificial Sequence
  Synthetic Sequence
tacagcccgc

SEQ ID NO: 3195 - DNA, 10 bp, Artificial Sequence
  Synthetic Sequence
atcaaatacc

SEQ ID NO: 3196 - DNA, 10 bp, Artificial Sequence
  Synthetic Sequence
cgggtaggat

SEQ ID NO: 3197 - DNA, 10 bp, Artificial Sequence
  Synthetic Sequence
gtcgtctacg

SEQ ID NO: 3198 - DNA, 10 bp, Artificial Sequence
  Synthetic Sequence
attgtcacgc

SEQ ID NO: 3199 - DNA, 10 bp, Artificial Sequence
  Synthetic Sequence
gtcgctgctg

SEQ ID NO: 3200 - DNA, 10 bp, Artificial Sequence
  Synthetic Sequence
tggacgcatt

SEQ ID NO: 3201 - DNA, 10 bp, Artificial Sequence
  Synthetic Sequence
tattctttac

SEQ ID NO: 3202 - DNA, 10 bp, Artificial Sequence
  Synthetic Sequence
tccatgtaac

SEQ ID NO: 3203 - DNA, 10 bp, Artificial Sequence
  Synthetic Sequence
cccgaacagt

SEQ ID NO: 3204 - DNA, 10 bp, Artificial Sequence
  Synthetic Sequence
atgatgagat

SEQ ID NO: 3205 - DNA, 10 bp, Artificial Sequence
  Synthetic Sequence
tacgactcga

SEQ ID NO: 3206 - DNA, 10 bp, Artificial Sequence
  Synthetic Sequence
ccattaaacg

SEQ ID NO: 3207 - DNA, 10 bp, Artificial Sequence
  Synthetic Sequence
acttagaatg

SEQ ID NO: 3208 - DNA, 10 bp, Artificial Sequence
  Synthetic Sequence
ggtgtgccat

SEQ ID NO: 3209 - DNA, 10 bp, Artificial Sequence
  Synthetic Sequence
gcacttgcca

SEQ ID NO: 3210 - DNA, 10 bp, Artificial Sequence
  Synthetic Sequence
caagagatcg

SEQ ID NO: 3211 - DNA, 10 bp, Artificial Sequence
  Synthetic Sequence
cctgggcttc

SEQ ID NO: 3212 - DNA, 10 bp, Artificial Sequence
  Synthetic Sequence
tcggagcttg

SEQ ID NO: 3213 - DNA, 10 bp, Artificial Sequence
  Synthetic Sequence
tatcatccaa

SEQ ID NO: 3214 - DNA, 10 bp, Artificial Sequence
  Synthetic Sequence
tcattagatt

SEQ ID NO: 3215 - DNA, 10 bp, Artificial Sequence
  Synthetic Sequence
gactgatcct

SEQ ID NO: 3216 - DNA, 10 bp, Artificial Sequence
  Synthetic Sequence
tggctgtacg

SEQ ID NO: 3217 - DNA, 10 bp, Artificial Sequence
  Synthetic Sequence
gtcaaacagg

SEQ ID NO: 3218 - DNA, 10 bp, Artificial Sequence
  Synthetic Sequence
tagatattgt

SEQ ID NO: 3219 - DNA, 10 bp, Artificial Sequence
  Synthetic Sequence
gagtgcgagg

SEQ ID NO: 3220 - DNA, 10 bp, Artificial Sequence
  Synthetic Sequence
acagcgccac

SEQ ID NO: 3221 - DNA, 10 bp, Artificial Sequence
  Synthetic Sequence
atgtgcttga

SEQ ID NO: 3222 - DNA, 10 bp, Artificial Sequence
  Synthetic Sequence
cctgatcagc

SEQ ID NO: 3223 - DNA, 10 bp, Artificial Sequence
  Synthetic Sequence
gtgaagtctg

SEQ ID NO: 3224 - DNA, 10 bp, Artificial Sequence
  Synthetic Sequence
tcggaggtca

SEQ ID NO: 3225 - DNA, 10 bp, Artificial Sequence
  Synthetic Sequence
gagtcattac

SEQ ID NO: 3226 - DNA, 10 bp, Artificial Sequence
  Synthetic Sequence
aagttgactg

SEQ ID NO: 3227 - DNA, 10 bp, Artificial Sequence
  Synthetic Sequence
cgaacgggtg

SEQ ID NO: 3228 - DNA, 10 bp, Artificial Sequence
  Synthetic Sequence
gcgatccgtc

SEQ ID NO: 3229 - DNA, 10 bp, Artificial Sequence
  Synthetic Sequence
aacggtatca

SEQ ID NO: 3230 - DNA, 10 bp, Artificial Sequence
  Synthetic Sequence
tacgcgtagt

SEQ ID NO: 3231 - DNA, 10 bp, Artificial Sequence
  Synthetic Sequence
acccacgata

SEQ ID NO: 3232 - DNA, 10 bp, Artificial Sequence
  Synthetic Sequence
aaggaagatt

SEQ ID NO: 3233 - DNA, 10 bp, Artificial Sequence
  Synthetic Sequence
aggttgctgt

SEQ ID NO: 3234 - DNA, 10 bp, Artificial Sequence
  Synthetic Sequence
ctgtgcctgt

SEQ ID NO: 3235 - DNA, 10 bp, Artificial Sequence
  Synthetic Sequence
gttgcaggct

SEQ ID NO: 3236 - DNA, 10 bp, Artificial Sequence
  Synthetic Sequence
agtatgcttg

SEQ ID NO: 3237 - DNA, 10 bp, Artificial Sequence
  Synthetic Sequence
gtgtaagccc

SEQ ID NO: 3238 - DNA, 10 bp, Artificial Sequence
  Synthetic Sequence
aaatgtccag

SEQ ID NO: 3239 - DNA, 10 bp, Artificial Sequence
  Synthetic Sequence
cggctaagtt

SEQ ID NO: 3240 - DNA, 10 bp, Artificial Sequence
  Synthetic Sequence
tttatagccc

SEQ ID NO: 3241 - DNA, 10 bp, Artificial Sequence
  Synthetic Sequence
aatgttcata

SEQ ID NO: 3242 - DNA, 10 bp, Artificial Sequence
  Synthetic Sequence
atacgtccct

SEQ ID NO: 3243 - DNA, 10 bp, Artificial Sequence
  Synthetic Sequence
cgggtctaat

SEQ ID NO: 3244 - DNA, 10 bp, Artificial Sequence
  Synthetic Sequence
ggtgggcatg

SEQ ID NO: 3245 - DNA, 10 bp, Artificial Sequence
  Synthetic Sequence
ggatagcgaa

SEQ ID NO: 3246 - DNA, 10 bp, Artificial Sequence
  Synthetic Sequence
aattatgaca

SEQ ID NO: 3247 - DNA, 10 bp, Artificial Sequence
  Synthetic Sequence
attgactatc

SEQ ID NO: 3248 - DNA, 10 bp, Artificial Sequence
  Synthetic Sequence
gcagctacgc

SEQ ID NO: 3249 - DNA, 10 bp, Artificial Sequence
  Synthetic Sequence
cgtggactta

SEQ ID NO: 3250 - DNA, 10 bp, Artificial Sequence
  Synthetic Sequence
taagacggtg

SEQ ID NO: 3251 - DNA, 10 bp, Artificial Sequence
  Synthetic Sequence
ctccaatcta

SEQ ID NO: 3252 - DNA, 10 bp, Artificial Sequence
  Synthetic Sequence
tcgtgacgag

SEQ ID NO: 3253 - DNA, 10 bp, Artificial Sequence
  Synthetic Sequence
gacgtagtaa

SEQ ID NO: 3254 - DNA, 10 bp, Artificial Sequence
  Synthetic Sequence
gtatatcttg

SEQ ID NO: 3255 - DNA, 10 bp, Artificial Sequence
  Synthetic Sequence
aaggccgatg

SEQ ID NO: 3256 - DNA, 10 bp, Artificial Sequence
  Synthetic Sequence
cataccagga

SEQ ID NO: 3257 - DNA, 10 bp, Artificial Sequence
  Synthetic Sequence
cattgtgtaa

SEQ ID NO: 3258 - DNA, 10 bp, Artificial Sequence
  Synthetic Sequence
ctttctcaca

SEQ ID NO: 3259 - DNA, 10 bp, Artificial Sequence
  Synthetic Sequence
aggagctccc

SEQ ID NO: 3260 - DNA, 10 bp, Artificial Sequence
  Synthetic Sequence
gaaatcgtcg

SEQ ID NO: 3261 - DNA, 10 bp, Artificial Sequence
  Synthetic Sequence
ttagtaagaa

SEQ ID NO: 3262 - DNA, 10 bp, Artificial Sequence
  Synthetic Sequence
gtatgggact

SEQ ID NO: 3263 - DNA, 10 bp, Artificial Sequence
  Synthetic Sequence
tcccgtaacg

SEQ ID NO: 3264 - DNA, 10 bp, Artificial Sequence
  Synthetic Sequence
cctagatagc

SEQ ID NO: 3265 - DNA, 10 bp, Artificial Sequence
  Synthetic Sequence
agcgctacta

SEQ ID NO: 3266 - DNA, 10 bp, Artificial Sequence
  Synthetic Sequence
cgcagcatct

SEQ ID NO: 3267 - DNA, 10 bp, Artificial Sequence
  Synthetic Sequence
acaaggtgac

SEQ ID NO: 3268 - DNA, 10 bp, Artificial Sequence
  Synthetic Sequence
gtgtaaaggt

SEQ ID NO: 3269 - DNA, 10 bp, Artificial Sequence
  Synthetic Sequence
gtctttacta

SEQ ID NO: 3270 - DNA, 10 bp, Artificial Sequence
  Synthetic Sequence
aaagtgctta

SEQ ID NO: 3271 - DNA, 10 bp, Artificial Sequence
  Synthetic Sequence
gctttgccaa

SEQ ID NO: 3272 - DNA, 10 bp, Artificial Sequence
  Synthetic Sequence
taccgctgac

SEQ ID NO: 3273 - DNA, 10 bp, Artificial Sequence
  Synthetic Sequence
gttcgagaat

SEQ ID NO: 3274 - DNA, 10 bp, Artificial Sequence
  Synthetic Sequence
aagatgtatc

SEQ ID NO: 3275 - DNA, 10 bp, Artificial Sequence
  Synthetic Sequence
gagtacaagt

SEQ ID NO: 3276 - DNA, 10 bp, Artificial Sequence
  Synthetic Sequence
agaacacaag

SEQ ID NO: 3277 - DNA, 10 bp, Artificial Sequence
  Synthetic Sequence
atgccggcga

SEQ ID NO: 3278 - DNA, 10 bp, Artificial Sequence
  Synthetic Sequence
cgaactgtag

SEQ ID NO: 3279 - DNA, 10 bp, Artificial Sequence
  Synthetic Sequence
ttctagcgca

SEQ ID NO: 3280 - DNA, 10 bp, Artificial Sequence
  Synthetic Sequence
aagcggtcgc

SEQ ID NO: 3281 - DNA, 10 bp, Artificial Sequence
  Synthetic Sequence
agtcgttgct

SEQ ID NO: 3282 - DNA, 10 bp, Artificial Sequence
  Synthetic Sequence
gaatcctcag

SEQ ID NO: 3283 - DNA, 10 bp, Artificial Sequence
  Synthetic Sequence
tgggcctgat

SEQ ID NO: 3284 - DNA, 10 bp, Artificial Sequence
  Synthetic Sequence
tttggcgaca

SEQ ID NO: 3285 - DNA, 10 bp, Artificial Sequence
  Synthetic Sequence
gaatacctag

SEQ ID NO: 3286 - DNA, 10 bp, Artificial Sequence
  Synthetic Sequence
tgtcagcacg

SEQ ID NO: 3287 - DNA, 10 bp, Artificial Sequence
  Synthetic Sequence
ctaggtgccc

SEQ ID NO: 3288 - DNA, 10 bp, Artificial Sequence
  Synthetic Sequence
gaaggaacaa

SEQ ID NO: 3289 - DNA, 10 bp, Artificial Sequence
  Synthetic Sequence
cacggtgaac

SEQ ID NO: 3290 - DNA, 10 bp, Artificial Sequence
  Synthetic Sequence
ctctagtaat

SEQ ID NO: 3291 - DNA, 10 bp, Artificial Sequence
  Synthetic Sequence
agacgtcggc

SEQ ID NO: 3292 - DNA, 10 bp, Artificial Sequence
  Synthetic Sequence
aaattgttag

SEQ ID NO: 3293 - DNA, 10 bp, Artificial Sequence
  Synthetic Sequence
aggtcacggg

SEQ ID NO: 3294 - DNA, 10 bp, Artificial Sequence
  Synthetic Sequence
gtagacagtc

SEQ ID NO: 3295 - DNA, 10 bp, Artificial Sequence
  Synthetic Sequence
ttaggtgaat

SEQ ID NO: 3296 - DNA, 10 bp, Artificial Sequence
  Synthetic Sequence
catcagatac

SEQ ID NO: 3297 - DNA, 10 bp, Artificial Sequence
  Synthetic Sequence
agctatgtga

SEQ ID NO: 3298 - DNA, 10 bp, Artificial Sequence
  Synthetic Sequence
gtcggcctta

SEQ ID NO: 3299 - DNA, 10 bp, Artificial Sequence
  Synthetic Sequence
gattaatatc

SEQ ID NO: 3300 - DNA, 10 bp, Artificial Sequence
  Synthetic Sequence
cgtaacttat

SEQ ID NO: 3301 - DNA, 10 bp, Artificial Sequence
  Synthetic Sequence
gaactaatac

SEQ ID NO: 3302 - DNA, 10 bp, Artificial Sequence
  Synthetic Sequence
gatccaaatc

SEQ ID NO: 3303 - DNA, 10 bp, Artificial Sequence
  Synthetic Sequence
gccagcaaga

SEQ ID NO: 3304 - DNA, 10 bp, Artificial Sequence
  Synthetic Sequence
aatctccggc

SEQ ID NO: 3305 - DNA, 10 bp, Artificial Sequence
  Synthetic Sequence
tcaccagccg

SEQ ID NO: 3306 - DNA, 10 bp, Artificial Sequence
  Synthetic Sequence
tcgccataat

SEQ ID NO: 3307 - DNA, 10 bp, Artificial Sequence
  Synthetic Sequence
ttgactgcga

SEQ ID NO: 3308 - DNA, 10 bp, Artificial Sequence
  Synthetic Sequence
tcgtcggtag

SEQ ID NO: 3309 - DNA, 10 bp, Artificial Sequence
  Synthetic Sequence
tggccctagc

SEQ ID NO: 3310 - DNA, 10 bp, Artificial Sequence
  Synthetic Sequence
tgaaccgctt

SEQ ID NO: 3311 - DNA, 10 bp, Artificial Sequence
  Synthetic Sequence
gtattgttgt

SEQ ID NO: 3312 - DNA, 10 bp, Artificial Sequence
  Synthetic Sequence
aattatacgt

SEQ ID NO: 3313 - DNA, 10 bp, Artificial Sequence
  Synthetic Sequence
gtggcccaca

SEQ ID NO: 3314 - DNA, 10 bp, Artificial Sequence
  Synthetic Sequence
aacatcggta

SEQ ID NO: 3315 - DNA, 10 bp, Artificial Sequence
  Synthetic Sequence
ttatcagatc

SEQ ID NO: 3316 - DNA, 10 bp, Artificial Sequence
  Synthetic Sequence
agcttgagtg

SEQ ID NO: 3317 - DNA, 10 bp, Artificial Sequence
  Synthetic Sequence
ggcatgcgac

SEQ ID NO: 3318 - DNA, 10 bp, Artificial Sequence
  Synthetic Sequence
ggtggtcggt

SEQ ID NO: 3319 - DNA, 10 bp, Artificial Sequence
  Synthetic Sequence
cgaaacccgt

SEQ ID NO: 3320 - DNA, 10 bp, Artificial Sequence
  Synthetic Sequence
caggcgagtg

SEQ ID NO: 3321 - DNA, 10 bp, Artificial Sequence
  Synthetic Sequence
tttagtcgaa

SEQ ID NO: 3322 - DNA, 10 bp, Artificial Sequence
  Synthetic Sequence
tacacgcgtg

SEQ ID NO: 3323 - DNA, 10 bp, Artificial Sequence
  Synthetic Sequence
ttgtctcgta

SEQ ID NO: 3324 - DNA, 10 bp, Artificial Sequence
  Synthetic Sequence
aatacaagac

SEQ ID NO: 3325 - DNA, 10 bp, Artificial Sequence
  Synthetic Sequence
aaacaccatc

SEQ ID NO: 3326 - DNA, 10 bp, Artificial Sequence
  Synthetic Sequence
tgatccctcc

SEQ ID NO: 3327 - DNA, 10 bp, Artificial Sequence
  Synthetic Sequence
agtgtgagcc

SEQ ID NO: 3328 - DNA, 10 bp, Artificial Sequence
  Synthetic Sequence
catcgccgtg

SEQ ID NO: 3329 - DNA, 10 bp, Artificial Sequence
  Synthetic Sequence
ccaccagtgc

SEQ ID NO: 3330 - DNA, 10 bp, Artificial Sequence
  Synthetic Sequence
tatacagtac

SEQ ID NO: 3331 - DNA, 10 bp, Artificial Sequence
  Synthetic Sequence
agagtaacac

SEQ ID NO: 3332 - DNA, 10 bp, Artificial Sequence
  Synthetic Sequence
tagttaacag

SEQ ID NO: 3333 - DNA, 10 bp, Artificial Sequence
  Synthetic Sequence
ctctatttct

SEQ ID NO: 3334 - DNA, 10 bp, Artificial Sequence
  Synthetic Sequence
aatgagacag

SEQ ID NO: 3335 - DNA, 10 bp, Artificial Sequence
  Synthetic Sequence
gctctacttc

SEQ ID NO: 3336 - DNA, 10 bp, Artificial Sequence
  Synthetic Sequence
agacctatga

SEQ ID NO: 3337 - DNA, 10 bp, Artificial Sequence
  Synthetic Sequence
ggcttcctgc

SEQ ID NO: 3338 - DNA, 10 bp, Artificial Sequence
  Synthetic Sequence
gtcgccaatg

SEQ ID NO: 3339 - DNA, 10 bp, Artificial Sequence
  Synthetic Sequence
tttcaatcag

SEQ ID NO: 3340 - DNA, 10 bp, Artificial Sequence
  Synthetic Sequence
cttcaatgct

SEQ ID NO: 3341 - DNA, 10 bp, Artificial Sequence
  Synthetic Sequence
gtcacgtctt

SEQ ID NO: 3342 - DNA, 10 bp, Artificial Sequence
  Synthetic Sequence
tgtctttaac

SEQ ID NO: 3343 - DNA, 10 bp, Artificial Sequence
  Synthetic Sequence
ttaaactgtg

SEQ ID NO: 3344 - DNA, 10 bp, Artificial Sequence
  Synthetic Sequence
gatgaacgct

SEQ ID NO: 3345 - DNA, 10 bp, Artificial Sequence
  Synthetic Sequence
gtttagcaat

SEQ ID NO: 3346 - DNA, 10 bp, Artificial Sequence
  Synthetic Sequence
taactattgg

SEQ ID NO: 3347 - DNA, 10 bp, Artificial Sequence
  Synthetic Sequence
ctcacagggc

SEQ ID NO: 3348 - DNA, 10 bp, Artificial Sequence
  Synthetic Sequence
aagtctgcag

SEQ ID NO: 3349 - DNA, 10 bp, Artificial Sequence
  Synthetic Sequence
cgaatcgatt

SEQ ID NO: 3350 - DNA, 10 bp, Artificial Sequence
  Synthetic Sequence
tgagcatgta

SEQ ID NO: 3351 - DNA, 10 bp, Artificial Sequence
  Synthetic Sequence
gctcgagacg

SEQ ID NO: 3352 - DNA, 10 bp, Artificial Sequence
  Synthetic Sequence
agaaccgccc

SEQ ID NO: 3353 - DNA, 10 bp, Artificial Sequence
  Synthetic Sequence
tcgactcttg

SEQ ID NO: 3354 - DNA, 10 bp, Artificial Sequence
  Synthetic Sequence
gtttgcctga

SEQ ID NO: 3355 - DNA, 10 bp, Artificial Sequence
  Synthetic Sequence
tacagtggga

SEQ ID NO: 3356 - DNA, 10 bp, Artificial Sequence
  Synthetic Sequence
tcagaactcg

SEQ ID NO: 3357 - DNA, 10 bp, Artificial Sequence
  Synthetic Sequence
gacgtttcta

SEQ ID NO: 3358 - DNA, 10 bp, Artificial Sequence
  Synthetic Sequence
acataggaaa

SEQ ID NO: 3359 - DNA, 10 bp, Artificial Sequence
  Synthetic Sequence
ctggtctttg

SEQ ID NO: 3360 - DNA, 10 bp, Artificial Sequence
  Synthetic Sequence
aagggtgaaa

SEQ ID NO: 3361 - DNA, 10 bp, Artificial Sequence
  Synthetic Sequence
tagaatcgtc

SEQ ID NO: 3362 - DNA, 10 bp, Artificial Sequence
  Synthetic Sequence
gtccgaagtc

SEQ ID NO: 3363 - DNA, 10 bp, Artificial Sequence
  Synthetic Sequence
actcgtgtga

SEQ ID NO: 3364 - DNA, 10 bp, Artificial Sequence
  Synthetic Sequence
ggtttaattg

SEQ ID NO: 3365 - DNA, 10 bp, Artificial Sequence
  Synthetic Sequence
cgattgtggt

SEQ ID NO: 3366 - DNA, 10 bp, Artificial Sequence
  Synthetic Sequence
agcacaaatc

SEQ ID NO: 3367 - DNA, 10 bp, Artificial Sequence
  Synthetic Sequence
cgacaaccaa

SEQ ID NO: 3368 - DNA, 10 bp, Artificial Sequence
  Synthetic Sequence
ttatcgcagt

SEQ ID NO: 3369 - DNA, 10 bp, Artificial Sequence
  Synthetic Sequence
gggcatcgta

SEQ ID NO: 3370 - DNA, 10 bp, Artificial Sequence
  Synthetic Sequence
cactgtcgtc

SEQ ID NO: 3371 - DNA, 10 bp, Artificial Sequence
  Synthetic Sequence
ctctaatttc

SEQ ID NO: 3372 - DNA, 10 bp, Artificial Sequence
  Synthetic Sequence
cagttctgtt

SEQ ID NO: 3373 - DNA, 10 bp, Artificial Sequence
  Synthetic Sequence
ctcatgccta

SEQ ID NO: 3374 - DNA, 10 bp, Artificial Sequence
  Synthetic Sequence
gcatcgcatg

SEQ ID NO: 3375 - DNA, 10 bp, Artificial Sequence
  Synthetic Sequence
gaaatggacc

SEQ ID NO: 3376 - DNA, 10 bp, Artificial Sequence
  Synthetic Sequence
caaagacctc

SEQ ID NO: 3377 - DNA, 10 bp, Artificial Sequence
  Synthetic Sequence
attacaacgt

SEQ ID NO: 3378 - DNA, 10 bp, Artificial Sequence
  Synthetic Sequence
acataagcag

SEQ ID NO: 3379 - DNA, 10 bp, Artificial Sequence
  Synthetic Sequence
gcgcagtgaa

SEQ ID NO: 3380 - DNA, 10 bp, Artificial Sequence
  Synthetic Sequence
gaggttgagg

SEQ ID NO: 3381 - DNA, 10 bp, Artificial Sequence
  Synthetic Sequence
cttcgctgtc

SEQ ID NO: 3382 - DNA, 10 bp, Artificial Sequence
  Synthetic Sequence
acaataaacc

SEQ ID NO: 3383 - DNA, 10 bp, Artificial Sequence
  Synthetic Sequence
cacgggtgct

SEQ ID NO: 3384 - DNA, 10 bp, Artificial Sequence
  Synthetic Sequence
cggagttatg

SEQ ID NO: 3385 - DNA, 10 bp, Artificial Sequence
  Synthetic Sequence
agtcgtgtac

SEQ ID NO: 3386 - DNA, 10 bp, Artificial Sequence
  Synthetic Sequence
ttaggtattg

SEQ ID NO: 3387 - DNA, 10 bp, Artificial Sequence
  Synthetic Sequence
agcctgttcg

SEQ ID NO: 3388 - DNA, 10 bp, Artificial Sequence
  Synthetic Sequence
ataactaacc

SEQ ID NO: 3389 - DNA, 10 bp, Artificial Sequence
  Synthetic Sequence
ccacagaggc

SEQ ID NO: 3390 - DNA, 10 bp, Artificial Sequence
  Synthetic Sequence
tgatgtcgga

SEQ ID NO: 3391 - DNA, 10 bp, Artificial Sequence
  Synthetic Sequence
ccgcaaggta

SEQ ID NO: 3392 - DNA, 10 bp, Artificial Sequence
  Synthetic Sequence
cgagcgttta

SEQ ID NO: 3393 - DNA, 10 bp, Artificial Sequence
  Synthetic Sequence
catgtgacgt

SEQ ID NO: 3394 - DNA, 10 bp, Artificial Sequence
  Synthetic Sequence
gcaatgtaaa

SEQ ID NO: 3395 - DNA, 10 bp, Artificial Sequence
  Synthetic Sequence
gatgtactca

SEQ ID NO: 3396 - DNA, 10 bp, Artificial Sequence
  Synthetic Sequence
atacggccac

SEQ ID NO: 3397 - DNA, 10 bp, Artificial Sequence
  Synthetic Sequence
ctccgggaat

SEQ ID NO: 3398 - DNA, 10 bp, Artificial Sequence
  Synthetic Sequence
gcgcggaatt

SEQ ID NO: 3399 - DNA, 10 bp, Artificial Sequence
  Synthetic Sequence
gatggttctc

SEQ ID NO: 3400 - DNA, 10 bp, Artificial Sequence
  Synthetic Sequence
accacatggc

SEQ ID NO: 3401 - DNA, 10 bp, Artificial Sequence
  Synthetic Sequence
atgcaacgga

SEQ ID NO: 3402 - DNA, 10 bp, Artificial Sequence
  Synthetic Sequence
ccaacgtctg

SEQ ID NO: 3403 - DNA, 10 bp, Artificial Sequence
  Synthetic Sequence
tatcccagca

SEQ ID NO: 3404 - DNA, 10 bp, Artificial Sequence
  Synthetic Sequence
cagctgtaga

SEQ ID NO: 3405 - DNA, 10 bp, Artificial Sequence
  Synthetic Sequence
accggtttgt

SEQ ID NO: 3406 - DNA, 10 bp, Artificial Sequence
  Synthetic Sequence
ttcaaccgcc

SEQ ID NO: 3407 - DNA, 10 bp, Artificial Sequence
  Synthetic Sequence
ctgttgacgt

SEQ ID NO: 3408 - DNA, 10 bp, Artificial Sequence
  Synthetic Sequence
agaccacccg

SEQ ID NO: 3409 - DNA, 10 bp, Artificial Sequence
  Synthetic Sequence
aatgttgcaa

SEQ ID NO: 3410 - DNA, 10 bp, Artificial Sequence
  Synthetic Sequence
cgtaggacat

SEQ ID NO: 3411 - DNA, 10 bp, Artificial Sequence
  Synthetic Sequence
gtgactgatg

SEQ ID NO: 3412 - DNA, 10 bp, Artificial Sequence
  Synthetic Sequence
ccgtcaccca

SEQ ID NO: 3413 - DNA, 10 bp, Artificial Sequence
  Synthetic Sequence
gcttgtcatt

SEQ ID NO: 3414 - DNA, 10 bp, Artificial Sequence
  Synthetic Sequence
ggccagaagt

SEQ ID NO: 3415 - DNA, 10 bp, Artificial Sequence
  Synthetic Sequence
cgcagggata

SEQ ID NO: 3416 - DNA, 10 bp, Artificial Sequence
  Synthetic Sequence
cttcggccgt

SEQ ID NO: 3417 - DNA, 10 bp, Artificial Sequence
  Synthetic Sequence
attcagcgag

SEQ ID NO: 3418 - DNA, 10 bp, Artificial Sequence
  Synthetic Sequence
acgattgaca

SEQ ID NO: 3419 - DNA, 10 bp, Artificial Sequence
  Synthetic Sequence
tagctaattg

SEQ ID NO: 3420 - DNA, 10 bp, Artificial Sequence
  Synthetic Sequence
tagggtatgg

SEQ ID NO: 3421 - DNA, 10 bp, Artificial Sequence
  Synthetic Sequence
atggcgagag

SEQ ID NO: 3422 - DNA, 10 bp, Artificial Sequence
  Synthetic Sequence
atttgcgcgt

SEQ ID NO: 3423 - DNA, 10 bp, Artificial Sequence
  Synthetic Sequence
tgtcgtggga

SEQ ID NO: 3424 - DNA, 10 bp, Artificial Sequence
  Synthetic Sequence
ctcgccgaac

SEQ ID NO: 3425 - DNA, 10 bp, Artificial Sequence
  Synthetic Sequence
gcttgaaacc

SEQ ID NO: 3426 - DNA, 10 bp, Artificial Sequence
  Synthetic Sequence
gcgacggtaa

SEQ ID NO: 3427 - DNA, 10 bp, Artificial Sequence
  Synthetic Sequence
gtaactttgc

SEQ ID NO: 3428 - DNA, 10 bp, Artificial Sequence
  Synthetic Sequence
taaactcaga

SEQ ID NO: 3429 - DNA, 10 bp, Artificial Sequence
  Synthetic Sequence
cgtagaccgc

SEQ ID NO: 3430 - DNA, 10 bp, Artificial Sequence
  Synthetic Sequence
gtttactcca

SEQ ID NO: 3431 - DNA, 10 bp, Artificial Sequence
  Synthetic Sequence
ccctggcgat

SEQ ID NO: 3432 - DNA, 10 bp, Artificial Sequence
  Synthetic Sequence
ctagggtcga

SEQ ID NO: 3433 - DNA, 10 bp, Artificial Sequence
  Synthetic Sequence
caatgttaat

SEQ ID NO: 3434 - DNA, 10 bp, Artificial Sequence
  Synthetic Sequence
gaggctctgg

SEQ ID NO: 3435 - DNA, 10 bp, Artificial Sequence
  Synthetic Sequence
gtgactggca

SEQ ID NO: 3436 - DNA, 10 bp, Artificial Sequence
  Synthetic Sequence
atctaaaggc

SEQ ID NO: 3437 - DNA, 10 bp, Artificial Sequence
  Synthetic Sequence
ttcgatgtac

SEQ ID NO: 3438 - DNA, 10 bp, Artificial Sequence
  Synthetic Sequence
agagggtgtg

SEQ ID NO: 3439 - DNA, 10 bp, Artificial Sequence
  Synthetic Sequence
ctggatgcgg

SEQ ID NO: 3440 - DNA, 10 bp, Artificial Sequence
  Synthetic Sequence
aggctccacc

SEQ ID NO: 3441 - DNA, 10 bp, Artificial Sequence
  Synthetic Sequence
tcctattggt

SEQ ID NO: 3442 - DNA, 10 bp, Artificial Sequence
  Synthetic Sequence
gacctggcat

SEQ ID NO: 3443 - DNA, 10 bp, Artificial Sequence
  Synthetic Sequence
tgcagcaata

SEQ ID NO: 3444 - DNA, 10 bp, Artificial Sequence
  Synthetic Sequence
aaacgtgtgc

SEQ ID NO: 3445 - DNA, 10 bp, Artificial Sequence
  Synthetic Sequence
ggacgctcag

SEQ ID NO: 3446 - DNA, 10 bp, Artificial Sequence
  Synthetic Sequence
cctgtttggg

SEQ ID NO: 3447 - DNA, 10 bp, Artificial Sequence
  Synthetic Sequence
tctgccatat

SEQ ID NO: 3448 - DNA, 10 bp, Artificial Sequence
  Synthetic Sequence
tcagagtata

SEQ ID NO: 3449 - DNA, 10 bp, Artificial Sequence
  Synthetic Sequence
gtaggtcgtc

SEQ ID NO: 3450 - DNA, 10 bp, Artificial Sequence
  Synthetic Sequence
aatggcttcg

SEQ ID NO: 3451 - DNA, 10 bp, Artificial Sequence
  Synthetic Sequence
cgcacacgtt

SEQ ID NO: 3452 - DNA, 10 bp, Artificial Sequence
  Synthetic Sequence
gctggcagca

SEQ ID NO: 3453 - DNA, 10 bp, Artificial Sequence
  Synthetic Sequence
cagcacagcg

SEQ ID NO: 3454 - DNA, 10 bp, Artificial Sequence
  Synthetic Sequence
aggcgagacg

SEQ ID NO: 3455 - DNA, 10 bp, Artificial Sequence
  Synthetic Sequence
ttgaaggcac

SEQ ID NO: 3456 - DNA, 10 bp, Artificial Sequence
  Synthetic Sequence
cgcaaagccg

SEQ ID NO: 3457 - DNA, 10 bp, Artificial Sequence
  Synthetic Sequence
ctcactcgga

SEQ ID NO: 3458 - DNA, 10 bp, Artificial Sequence
  Synthetic Sequence
gcttgcttcg

SEQ ID NO: 3459 - DNA, 10 bp, Artificial Sequence
  Synthetic Sequence
aaggagcaag

SEQ ID NO: 3460 - DNA, 10 bp, Artificial Sequence
  Synthetic Sequence
actttaaatt

SEQ ID NO: 3461 - DNA, 10 bp, Artificial Sequence
  Synthetic Sequence
taatgcaaat

SEQ ID NO: 3462 - DNA, 10 bp, Artificial Sequence
  Synthetic Sequence
ttctacttta

SEQ ID NO: 3463 - DNA, 10 bp, Artificial Sequence
  Synthetic Sequence
ccctatgcat

SEQ ID NO: 3464 - DNA, 10 bp, Artificial Sequence
  Synthetic Sequence
cacttatccg

SEQ ID NO: 3465 - DNA, 10 bp, Artificial Sequence
  Synthetic Sequence
gctcgggcta

SEQ ID NO: 3466 - DNA, 10 bp, Artificial Sequence
  Synthetic Sequence
ggtcatcact

SEQ ID NO: 3467 - DNA, 10 bp, Artificial Sequence
  Synthetic Sequence
ggaggtaaga

SEQ ID NO: 3468 - DNA, 10 bp, Artificial Sequence
  Synthetic Sequence
tcccacacac

SEQ ID NO: 3469 - DNA, 10 bp, Artificial Sequence
  Synthetic Sequence
acattggttg

SEQ ID NO: 3470 - DNA, 10 bp, Artificial Sequence
  Synthetic Sequence
acgcgctcaa

SEQ ID NO: 3471 - DNA, 10 bp, Artificial Sequence
  Synthetic Sequence
ctatgggatc

SEQ ID NO: 3472 - DNA, 10 bp, Artificial Sequence
  Synthetic Sequence
atcggtcgga

SEQ ID NO: 3473 - DNA, 10 bp, Artificial Sequence
  Synthetic Sequence
aaccggtgcc

SEQ ID NO: 3474 - DNA, 10 bp, Artificial Sequence
  Synthetic Sequence
acacacggaa

SEQ ID NO: 3475 - DNA, 10 bp, Artificial Sequence
  Synthetic Sequence
attcctcgtg

SEQ ID NO: 3476 - DNA, 10 bp, Artificial Sequence
  Synthetic Sequence
acacgacctc

SEQ ID NO: 3477 - DNA, 10 bp, Artificial Sequence
  Synthetic Sequence
tcacgcacta

SEQ ID NO: 3478 - DNA, 10 bp, Artificial Sequence
  Synthetic Sequence
aggatggagg

SEQ ID NO: 3479 - DNA, 10 bp, Artificial Sequence
  Synthetic Sequence
cctctcatta

SEQ ID NO: 3480 - DNA, 10 bp, Artificial Sequence
  Synthetic Sequence
cctacctgct

SEQ ID NO: 3481 - DNA, 10 bp, Artificial Sequence
  Synthetic Sequence
aataatctgt

SEQ ID NO: 3482 - DNA, 10 bp, Artificial Sequence
  Synthetic Sequence
aatctgtcat

SEQ ID NO: 3483 - DNA, 10 bp, Artificial Sequence
  Synthetic Sequence
cgaataactc

SEQ ID NO: 3484 - DNA, 10 bp, Artificial Sequence
  Synthetic Sequence
aatatataac

SEQ ID NO: 3485 - DNA, 10 bp, Artificial Sequence
  Synthetic Sequence
cgtatgcagc

SEQ ID NO: 3486 - DNA, 10 bp, Artificial Sequence
  Synthetic Sequence
tgagagaagt

SEQ ID NO: 3487 - DNA, 10 bp, Artificial Sequence
  Synthetic Sequence
tacctagact

SEQ ID NO: 3488 - DNA, 10 bp, Artificial Sequence
  Synthetic Sequence
ctcgggcact

SEQ ID NO: 3489 - DNA, 10 bp, Artificial Sequence
  Synthetic Sequence
gttaaacgta

SEQ ID NO: 3490 - DNA, 10 bp, Artificial Sequence
  Synthetic Sequence
cgcgttggca

SEQ ID NO: 3491 - DNA, 10 bp, Artificial Sequence
  Synthetic Sequence
tagcccgtag

SEQ ID NO: 3492 - DNA, 10 bp, Artificial Sequence
  Synthetic Sequence
caatgggtct

SEQ ID NO: 3493 - DNA, 10 bp, Artificial Sequence
  Synthetic Sequence
cctgggtacg

SEQ ID NO: 3494 - DNA, 10 bp, Artificial Sequence
  Synthetic Sequence
atcgaagtct

SEQ ID NO: 3495 - DNA, 10 bp, Artificial Sequence
  Synthetic Sequence
aagttctggg

SEQ ID NO: 3496 - DNA, 10 bp, Artificial Sequence
  Synthetic Sequence
gtcgagaaag

SEQ ID NO: 3497 - DNA, 10 bp, Artificial Sequence
  Synthetic Sequence
gagcttgcct

SEQ ID NO: 3498 - DNA, 10 bp, Artificial Sequence
  Synthetic Sequence
tattgcaggg

SEQ ID NO: 3499 - DNA, 10 bp, Artificial Sequence
  Synthetic Sequence
gccagttgcc

SEQ ID NO: 3500 - DNA, 10 bp, Artificial Sequence
  Synthetic Sequence
accgatgagt

SEQ ID NO: 3501 - DNA, 10 bp, Artificial Sequence
  Synthetic Sequence
actattagcc

SEQ ID NO: 3502 - DNA, 10 bp, Artificial Sequence
  Synthetic Sequence
ctcacagtca

SEQ ID NO: 3503 - DNA, 10 bp, Artificial Sequence
  Synthetic Sequence
tggaagatca

SEQ ID NO: 3504 - DNA, 10 bp, Artificial Sequence
  Synthetic Sequence
gggttagctg

SEQ ID NO: 3505 - DNA, 10 bp, Artificial Sequence
  Synthetic Sequence
aaaccagtca

SEQ ID NO: 3506 - DNA, 10 bp, Artificial Sequence
  Synthetic Sequence
ctctccatta

SEQ ID NO: 3507 - DNA, 10 bp, Artificial Sequence
  Synthetic Sequence
ataaagtacg

SEQ ID NO: 3508 - DNA, 10 bp, Artificial Sequence
  Synthetic Sequence
ggtcccttaa

SEQ ID NO: 3509 - DNA, 10 bp, Artificial Sequence
  Synthetic Sequence
aacctacgct

SEQ ID NO: 3510 - DNA, 10 bp, Artificial Sequence
  Synthetic Sequence
tatagtaggc

SEQ ID NO: 3511 - DNA, 10 bp, Artificial Sequence
  Synthetic Sequence
ctaaggctct

SEQ ID NO: 3512 - DNA, 10 bp, Artificial Sequence
  Synthetic Sequence
cgaaacatta

SEQ ID NO: 3513 - DNA, 10 bp, Artificial Sequence
  Synthetic Sequence
tatccctcta

SEQ ID NO: 3514 - DNA, 10 bp, Artificial Sequence
  Synthetic Sequence
ccgtcacaat

SEQ ID NO: 3515 - DNA, 10 bp, Artificial Sequence
  Synthetic Sequence
atcgtgtctc

SEQ ID NO: 3516 - DNA, 10 bp, Artificial Sequence
  Synthetic Sequence
aataaggctt

SEQ ID NO: 3517 - DNA, 10 bp, Artificial Sequence
  Synthetic Sequence
gctaggatca

SEQ ID NO: 3518 - DNA, 10 bp, Artificial Sequence
  Synthetic Sequence
aagacgcggc

SEQ ID NO: 3519 - DNA, 10 bp, Artificial Sequence
  Synthetic Sequence
tagccgcacg

SEQ ID NO: 3520 - DNA, 10 bp, Artificial Sequence
  Synthetic Sequence
gaatgttcta

SEQ ID NO: 3521 - DNA, 10 bp, Artificial Sequence
  Synthetic Sequence
gtcgatatct

SEQ ID NO: 3522 - DNA, 10 bp, Artificial Sequence
  Synthetic Sequence
ggagaaatca

SEQ ID NO: 3523 - DNA, 10 bp, Artificial Sequence
  Synthetic Sequence
ctaaccgttt

SEQ ID NO: 3524 - DNA, 10 bp, Artificial Sequence
  Synthetic Sequence
gggcagacaa

SEQ ID NO: 3525 - DNA, 10 bp, Artificial Sequence
  Synthetic Sequence
gctatagccg

SEQ ID NO: 3526 - DNA, 10 bp, Artificial Sequence
  Synthetic Sequence
gcaaggtatt

SEQ ID NO: 3527 - DNA, 10 bp, Artificial Sequence
  Synthetic Sequence
cggacccttt

SEQ ID NO: 3528 - DNA, 10 bp, Artificial Sequence
  Synthetic Sequence
tctggatcta

SEQ ID NO: 3529 - DNA, 10 bp, Artificial Sequence
  Synthetic Sequence
cccgtgtagt

SEQ ID NO: 3530 - DNA, 10 bp, Artificial Sequence
  Synthetic Sequence
tgggctgagc

SEQ ID NO: 3531 - DNA, 10 bp, Artificial Sequence
  Synthetic Sequence
ggtaatacta

SEQ ID NO: 3532 - DNA, 10 bp, Artificial Sequence
  Synthetic Sequence
gcatctgcag

SEQ ID NO: 3533 - DNA, 10 bp, Artificial Sequence
  Synthetic Sequence
gcgtgaccga

SEQ ID NO: 3534 - DNA, 10 bp, Artificial Sequence
  Synthetic Sequence
gcagcgatgg

SEQ ID NO: 3535 - DNA, 10 bp, Artificial Sequence
  Synthetic Sequence
cccgactctg

SEQ ID NO: 3536 - DNA, 10 bp, Artificial Sequence
  Synthetic Sequence
cggtacatac

SEQ ID NO: 3537 - DNA, 10 bp, Artificial Sequence
  Synthetic Sequence
cccatgtgtt

SEQ ID NO: 3538 - DNA, 10 bp, Artificial Sequence
  Synthetic Sequence
acacccttgg

SEQ ID NO: 3539 - DNA, 10 bp, Artificial Sequence
  Synthetic Sequence
tttcaggcta

SEQ ID NO: 3540 - DNA, 10 bp, Artificial Sequence
  Synthetic Sequence
cagggactga

SEQ ID NO: 3541 - DNA, 10 bp, Artificial Sequence
  Synthetic Sequence
ggaactacct

SEQ ID NO: 3542 - DNA, 10 bp, Artificial Sequence
  Synthetic Sequence
cgctctacgg

SEQ ID NO: 3543 - DNA, 10 bp, Artificial Sequence
  Synthetic Sequence
aggagtcata

SEQ ID NO: 3544 - DNA, 10 bp, Artificial Sequence
  Synthetic Sequence
cggtaggaca

SEQ ID NO: 3545 - DNA, 10 bp, Artificial Sequence
  Synthetic Sequence
tttgtgcact

SEQ ID NO: 3546 - DNA, 10 bp, Artificial Sequence
  Synthetic Sequence
atccggtcaa

SEQ ID NO: 3547 - DNA, 10 bp, Artificial Sequence
  Synthetic Sequence
ttctattctg

SEQ ID NO: 3548 - DNA, 10 bp, Artificial Sequence
  Synthetic Sequence
atgttcagcc

SEQ ID NO: 3549 - DNA, 10 bp, Artificial Sequence
  Synthetic Sequence
ggcaacacaa

SEQ ID NO: 3550 - DNA, 10 bp, Artificial Sequence
  Synthetic Sequence
gtgagacaac

SEQ ID NO: 3551 - DNA, 10 bp, Artificial Sequence
  Synthetic Sequence
ggactgagtc

SEQ ID NO: 3552 - DNA, 10 bp, Artificial Sequence
  Synthetic Sequence
aatcccgatt

SEQ ID NO: 3553 - DNA, 10 bp, Artificial Sequence
  Synthetic Sequence
accagacttt

SEQ ID NO: 3554 - DNA, 10 bp, Artificial Sequence
  Synthetic Sequence
gcgcacctga

SEQ ID NO: 3555 - DNA, 10 bp, Artificial Sequence
  Synthetic Sequence
ctctcggagg

SEQ ID NO: 3556 - DNA, 10 bp, Artificial Sequence
  Synthetic Sequence
aagagacgaa

SEQ ID NO: 3557 - DNA, 10 bp, Artificial Sequence
  Synthetic Sequence
attataggtg

SEQ ID NO: 3558 - DNA, 10 bp, Artificial Sequence
  Synthetic Sequence
gtgcgtccca

SEQ ID NO: 3559 - DNA, 10 bp, Artificial Sequence
  Synthetic Sequence
ccgggaagga

SEQ ID NO: 3560 - DNA, 10 bp, Artificial Sequence
  Synthetic Sequence
actatggaac

SEQ ID NO: 3561 - DNA, 10 bp, Artificial Sequence
  Synthetic Sequence
cctgatccat

SEQ ID NO: 3562 - DNA, 10 bp, Artificial Sequence
  Synthetic Sequence
aactcaacaa

SEQ ID NO: 3563 - DNA, 10 bp, Artificial Sequence
  Synthetic Sequence
gatagagtcg

SEQ ID NO: 3564 - DNA, 10 bp, Artificial Sequence
  Synthetic Sequence
tatcagtccg

SEQ ID NO: 3565 - DNA, 10 bp, Artificial Sequence
  Synthetic Sequence
atacctacgc

SEQ ID NO: 3566 - DNA, 10 bp, Artificial Sequence
  Synthetic Sequence
cgggaaagtg

SEQ ID NO: 3567 - DNA, 10 bp, Artificial Sequence
  Synthetic Sequence
cacaacagat

SEQ ID NO: 3568 - DNA, 10 bp, Artificial Sequence
  Synthetic Sequence
cccaagcgag

SEQ ID NO: 3569 - DNA, 10 bp, Artificial Sequence
  Synthetic Sequence
attatacggc

SEQ ID NO: 3570 - DNA, 10 bp, Artificial Sequence
  Synthetic Sequence
cacacctaga

SEQ ID NO: 3571 - DNA, 10 bp, Artificial Sequence
  Synthetic Sequence
agcctacttg

SEQ ID NO: 3572 - DNA, 10 bp, Artificial Sequence
  Synthetic Sequence
cgacttctgg

SEQ ID NO: 3573 - DNA, 10 bp, Artificial Sequence
  Synthetic Sequence
taatagctga

SEQ ID NO: 3574 - DNA, 10 bp, Artificial Sequence
  Synthetic Sequence
ggagcacggt

SEQ ID NO: 3575 - DNA, 10 bp, Artificial Sequence
  Synthetic Sequence
cgtcagttct

SEQ ID NO: 3576 - DNA, 10 bp, Artificial Sequence
  Synthetic Sequence
tctttaattc

SEQ ID NO: 3577 - DNA, 10 bp, Artificial Sequence
  Synthetic Sequence
gcccgaaagt

SEQ ID NO: 3578 - DNA, 10 bp, Artificial Sequence
  Synthetic Sequence
cggtgaaggc

SEQ ID NO: 3579 - DNA, 10 bp, Artificial Sequence
  Synthetic Sequence
actgggaaac

SEQ ID NO: 3580 - DNA, 10 bp, Artificial Sequence
  Synthetic Sequence
atgatgtcaa

SEQ ID NO: 3581 - DNA, 10 bp, Artificial Sequence
  Synthetic Sequence
attccggttg

SEQ ID NO: 3582 - DNA, 10 bp, Artificial Sequence
  Synthetic Sequence
acgagcgtac

SEQ ID NO: 3583 - DNA, 10 bp, Artificial Sequence
  Synthetic Sequence
gcagcagcgt

SEQ ID NO: 3584 - DNA, 10 bp, Artificial Sequence
  Synthetic Sequence
agatgagtcc

SEQ ID NO: 3585 - DNA, 10 bp, Artificial Sequence
  Synthetic Sequence
cttgtcagga

SEQ ID NO: 3586 - DNA, 10 bp, Artificial Sequence
  Synthetic Sequence
agtggttagt

SEQ ID NO: 3587 - DNA, 10 bp, Artificial Sequence
  Synthetic Sequence
taaattcttc

SEQ ID NO: 3588 - DNA, 10 bp, Artificial Sequence
  Synthetic Sequence
aacctcagac

SEQ ID NO: 3589 - DNA, 10 bp, Artificial Sequence
  Synthetic Sequence
cgtcacgcac

SEQ ID NO: 3590 - DNA, 10 bp, Artificial Sequence
  Synthetic Sequence
cgttaatcga

SEQ ID NO: 3591 - DNA, 10 bp, Artificial Sequence
  Synthetic Sequence
ggtgtatatc

SEQ ID NO: 3592 - DNA, 10 bp, Artificial Sequence
  Synthetic Sequence
gcgaaagtct

SEQ ID NO: 3593 - DNA, 10 bp, Artificial Sequence
  Synthetic Sequence
ttcaggttag

SEQ ID NO: 3594 - DNA, 10 bp, Artificial Sequence
  Synthetic Sequence
agacaatttc

SEQ ID NO: 3595 - DNA, 10 bp, Artificial Sequence
  Synthetic Sequence
accaaagcgg

SEQ ID NO: 3596 - DNA, 10 bp, Artificial Sequence
  Synthetic Sequence
tttcacagcg

SEQ ID NO: 3597 - DNA, 10 bp, Artificial Sequence
  Synthetic Sequence
gtaccaccta

SEQ ID NO: 3598 - DNA, 10 bp, Artificial Sequence
  Synthetic Sequence
ccgcacacat

SEQ ID NO: 3599 - DNA, 10 bp, Artificial Sequence
  Synthetic Sequence
agaaacggta

SEQ ID NO: 3600 - DNA, 10 bp, Artificial Sequence
  Synthetic Sequence
gtgttgaaat

SEQ ID NO: 3601 - DNA, 10 bp, Artificial Sequence
  Synthetic Sequence
attaccggtt

SEQ ID NO: 3602 - DNA, 10 bp, Artificial Sequence
  Synthetic Sequence
gcatttaatt

SEQ ID NO: 3603 - DNA, 10 bp, Artificial Sequence
  Synthetic Sequence
tcacgtcggt

SEQ ID NO: 3604 - DNA, 10 bp, Artificial Sequence
  Synthetic Sequence
ccatacttct

SEQ ID NO: 3605 - DNA, 10 bp, Artificial Sequence
  Synthetic Sequence
atatgccgtt

SEQ ID NO: 3606 - DNA, 10 bp, Artificial Sequence
  Synthetic Sequence
gattaaccaa

SEQ ID NO: 3607 - DNA, 10 bp, Artificial Sequence
  Synthetic Sequence
ggctgttcgg

SEQ ID NO: 3608 - DNA, 10 bp, Artificial Sequence
  Synthetic Sequence
tccgtgttgg

SEQ ID NO: 3609 - DNA, 10 bp, Artificial Sequence
  Synthetic Sequence
ctaatttcta

SEQ ID NO: 3610 - DNA, 10 bp, Artificial Sequence
  Synthetic Sequence
agcgcccaac

SEQ ID NO: 3611 - DNA, 10 bp, Artificial Sequence
  Synthetic Sequence
gcaacttgag

SEQ ID NO: 3612 - DNA, 10 bp, Artificial Sequence
  Synthetic Sequence
cgagcggcat

SEQ ID NO: 3613 - DNA, 10 bp, Artificial Sequence
  Synthetic Sequence
cccgctcatc

SEQ ID NO: 3614 - DNA, 10 bp, Artificial Sequence
  Synthetic Sequence
tgattggcat

SEQ ID NO: 3615 - DNA, 10 bp, Artificial Sequence
  Synthetic Sequence
tggacatttg

SEQ ID NO: 3616 - DNA, 10 bp, Artificial Sequence
  Synthetic Sequence
caagtatgat

SEQ ID NO: 3617 - DNA, 10 bp, Artificial Sequence
  Synthetic Sequence
cccagtcaca

SEQ ID NO: 3618 - DNA, 10 bp, Artificial Sequence
  Synthetic Sequence
gacactatcc

SEQ ID NO: 3619 - DNA, 10 bp, Artificial Sequence
  Synthetic Sequence
ctatgagccg

SEQ ID NO: 3620 - DNA, 10 bp, Artificial Sequence
  Synthetic Sequence
ttcgttcata

SEQ ID NO: 3621 - DNA, 10 bp, Artificial Sequence
  Synthetic Sequence
tcgttgaata

SEQ ID NO: 3622 - DNA, 10 bp, Artificial Sequence
  Synthetic Sequence
gccatacagc

SEQ ID NO: 3623 - DNA, 10 bp, Artificial Sequence
  Synthetic Sequence
atgcctgtct

SEQ ID NO: 3624 - DNA, 10 bp, Artificial Sequence
  Synthetic Sequence
cgtaccttgg

SEQ ID NO: 3625 - DNA, 10 bp, Artificial Sequence
  Synthetic Sequence
cgcttcaata

SEQ ID NO: 3626 - DNA, 10 bp, Artificial Sequence
  Synthetic Sequence
aaagtgggca

SEQ ID NO: 3627 - DNA, 10 bp, Artificial Sequence
  Synthetic Sequence
taccaggcgg

SEQ ID NO: 3628 - DNA, 10 bp, Artificial Sequence
  Synthetic Sequence
caatacgaaa

SEQ ID NO: 3629 - DNA, 10 bp, Artificial Sequence
  Synthetic Sequence
gaactcctat

SEQ ID NO: 3630 - DNA, 10 bp, Artificial Sequence
  Synthetic Sequence
ccctaaattg

SEQ ID NO: 3631 - DNA, 10 bp, Artificial Sequence
  Synthetic Sequence
cttagactga

SEQ ID NO: 3632 - DNA, 10 bp, Artificial Sequence
  Synthetic Sequence
cacggaaata

SEQ ID NO: 3633 - DNA, 10 bp, Artificial Sequence
  Synthetic Sequence
gccgttctct

SEQ ID NO: 3634 - DNA, 10 bp, Artificial Sequence
  Synthetic Sequence
acgtgccttc

SEQ ID NO: 3635 - DNA, 10 bp, Artificial Sequence
  Synthetic Sequence
ctatggtagt

SEQ ID NO: 3636 - DNA, 10 bp, Artificial Sequence
  Synthetic Sequence
gagaagctct

SEQ ID NO: 3637 - DNA, 10 bp, Artificial Sequence
  Synthetic Sequence
aaagccagac

SEQ ID NO: 3638 - DNA, 10 bp, Artificial Sequence
  Synthetic Sequence
ctgtacaaat

SEQ ID NO: 3639 - DNA, 10 bp, Artificial Sequence
  Synthetic Sequence
tcggattccg

SEQ ID NO: 3640 - DNA, 10 bp, Artificial Sequence
  Synthetic Sequence
agggcatcgc

SEQ ID NO: 3641 - DNA, 10 bp, Artificial Sequence
  Synthetic Sequence
ctacttagcg

SEQ ID NO: 3642 - DNA, 10 bp, Artificial Sequence
  Synthetic Sequence
gctaaaggat

SEQ ID NO: 3643 - DNA, 10 bp, Artificial Sequence
  Synthetic Sequence
gcgttcatac

SEQ ID NO: 3644 - DNA, 10 bp, Artificial Sequence
  Synthetic Sequence
ttactaaaga

SEQ ID NO: 3645 - DNA, 10 bp, Artificial Sequence
  Synthetic Sequence
agggcaatta

SEQ ID NO: 3646 - DNA, 10 bp, Artificial Sequence
  Synthetic Sequence
gtgctcagtc

SEQ ID NO: 3647 - DNA, 10 bp, Artificial Sequence
  Synthetic Sequence
accatttaaa

SEQ ID NO: 3648 - DNA, 10 bp, Artificial Sequence
  Synthetic Sequence
atatttgtag

SEQ ID NO: 3649 - DNA, 10 bp, Artificial Sequence
  Synthetic Sequence
ccaagtggtt

SEQ ID NO: 3650 - DNA, 10 bp, Artificial Sequence
  Synthetic Sequence
ttgaaggaca

SEQ ID NO: 3651 - DNA, 10 bp, Artificial Sequence
  Synthetic Sequence
tgagcagcgg

SEQ ID NO: 3652 - DNA, 10 bp, Artificial Sequence
  Synthetic Sequence
gtagaggcat

SEQ ID NO: 3653 - DNA, 10 bp, Artificial Sequence
  Synthetic Sequence
gaataaagcc

SEQ ID NO: 3654 - DNA, 10 bp, Artificial Sequence
  Synthetic Sequence
ggttgtagcg

SEQ ID NO: 3655 - DNA, 10 bp, Artificial Sequence
  Synthetic Sequence
tactgaaatt

SEQ ID NO: 3656 - DNA, 10 bp, Artificial Sequence
  Synthetic Sequence
aacattcccg

SEQ ID NO: 3657 - DNA, 10 bp, Artificial Sequence
  Synthetic Sequence
gagggctgga

SEQ ID NO: 3658 - DNA, 10 bp, Artificial Sequence
  Synthetic Sequence
tcaccggatt

SEQ ID NO: 3659 - DNA, 10 bp, Artificial Sequence
  Synthetic Sequence
ttactgagtt

SEQ ID NO: 3660 - DNA, 10 bp, Artificial Sequence
  Synthetic Sequence
cacaagcgta

SEQ ID NO: 3661 - DNA, 10 bp, Artificial Sequence
  Synthetic Sequence
taatagtacc

SEQ ID NO: 3662 - DNA, 10 bp, Artificial Sequence
  Synthetic Sequence
gcctgtggca

SEQ ID NO: 3663 - DNA, 10 bp, Artificial Sequence
  Synthetic Sequence
cacagtgcta

SEQ ID NO: 3664 - DNA, 10 bp, Artificial Sequence
  Synthetic Sequence
aagggcaatc

SEQ ID NO: 3665 - DNA, 10 bp, Artificial Sequence
  Synthetic Sequence
aagtgaagct

SEQ ID NO: 3666 - DNA, 10 bp, Artificial Sequence
  Synthetic Sequence
aaggactgat

SEQ ID NO: 3667 - DNA, 10 bp, Artificial Sequence
  Synthetic Sequence
ctgagagact

SEQ ID NO: 3668 - DNA, 10 bp, Artificial Sequence
  Synthetic Sequence
tccaccgtct

SEQ ID NO: 3669 - DNA, 10 bp, Artificial Sequence
  Synthetic Sequence
agcacagttg

SEQ ID NO: 3670 - DNA, 10 bp, Artificial Sequence
  Synthetic Sequence
cttgctatcg

SEQ ID NO: 3671 - DNA, 10 bp, Artificial Sequence
  Synthetic Sequence
ttatgtgaga

SEQ ID NO: 3672 - DNA, 10 bp, Artificial Sequence
  Synthetic Sequence
aagtatacta

SEQ ID NO: 3673 - DNA, 10 bp, Artificial Sequence
  Synthetic Sequence
tgatgtgcct

SEQ ID NO: 3674 - DNA, 10 bp, Artificial Sequence
  Synthetic Sequence
gttgagcttg

SEQ ID NO: 3675 - DNA, 10 bp, Artificial Sequence
  Synthetic Sequence
accagtaccg

SEQ ID NO: 3676 - DNA, 10 bp, Artificial Sequence
  Synthetic Sequence
gctgtaccgt

SEQ ID NO: 3677 - DNA, 10 bp, Artificial Sequence
  Synthetic Sequence
tgggtcggca

SEQ ID NO: 3678 - DNA, 10 bp, Artificial Sequence
  Synthetic Sequence
tactaatcta

SEQ ID NO: 3679 - DNA, 10 bp, Artificial Sequence
  Synthetic Sequence
tgatatccgc

SEQ ID NO: 3680 - DNA, 10 bp, Artificial Sequence
  Synthetic Sequence
tatatagtct

SEQ ID NO: 3681 - DNA, 10 bp, Artificial Sequence
  Synthetic Sequence
ttgttgcttc

SEQ ID NO: 3682 - DNA, 10 bp, Artificial Sequence
  Synthetic Sequence
gtctggaagg

SEQ ID NO: 3683 - DNA, 10 bp, Artificial Sequence
  Synthetic Sequence
gttaactctc

SEQ ID NO: 3684 - DNA, 10 bp, Artificial Sequence
  Synthetic Sequence
cgtagccagg

SEQ ID NO: 3685 - DNA, 10 bp, Artificial Sequence
  Synthetic Sequence
gactataggc

SEQ ID NO: 3686 - DNA, 10 bp, Artificial Sequence
  Synthetic Sequence
actggaaccg

SEQ ID NO: 3687 - DNA, 10 bp, Artificial Sequence
  Synthetic Sequence
ttcttccgag

SEQ ID NO: 3688 - DNA, 10 bp, Artificial Sequence
  Synthetic Sequence
ccttaaatcc

SEQ ID NO: 3689 - DNA, 10 bp, Artificial Sequence
  Synthetic Sequence
acgcctcgca

SEQ ID NO: 3690 - DNA, 10 bp, Artificial Sequence
  Synthetic Sequence
tcccaatgaa

SEQ ID NO: 3691 - DNA, 10 bp, Artificial Sequence
  Synthetic Sequence
tctaggcttt

SEQ ID NO: 3692 - DNA, 10 bp, Artificial Sequence
  Synthetic Sequence
acggacagta

SEQ ID NO: 3693 - DNA, 10 bp, Artificial Sequence
  Synthetic Sequence
actaccacta

SEQ ID NO: 3694 - DNA, 10 bp, Artificial Sequence
  Synthetic Sequence
atcccaactt

SEQ ID NO: 3695 - DNA, 10 bp, Artificial Sequence
  Synthetic Sequence
gaggcaacgg

SEQ ID NO: 3696 - DNA, 10 bp, Artificial Sequence
  Synthetic Sequence
cctatgattt

SEQ ID NO: 3697 - DNA, 10 bp, Artificial Sequence
  Synthetic Sequence
ctcacaatgt

SEQ ID NO: 3698 - DNA, 10 bp, Artificial Sequence
  Synthetic Sequence
tcgatgcgtt

SEQ ID NO: 3699 - DNA, 10 bp, Artificial Sequence
  Synthetic Sequence
atttacgcac

SEQ ID NO: 3700 - DNA, 10 bp, Artificial Sequence
  Synthetic Sequence
ttgttgtaag

SEQ ID NO: 3701 - DNA, 10 bp, Artificial Sequence
  Synthetic Sequence
ctacccttgt

SEQ ID NO: 3702 - DNA, 10 bp, Artificial Sequence
  Synthetic Sequence
tctctcccga

SEQ ID NO: 3703 - DNA, 10 bp, Artificial Sequence
  Synthetic Sequence
ggcaaattca

SEQ ID NO: 3704 - DNA, 10 bp, Artificial Sequence
  Synthetic Sequence
gtatcttagg

SEQ ID NO: 3705 - DNA, 10 bp, Artificial Sequence
  Synthetic Sequence
aaactcgaag

SEQ ID NO: 3706 - DNA, 10 bp, Artificial Sequence
  Synthetic Sequence
gcccttatta

SEQ ID NO: 3707 - DNA, 10 bp, Artificial Sequence
  Synthetic Sequence
ttactagttc

SEQ ID NO: 3708 - DNA, 10 bp, Artificial Sequence
  Synthetic Sequence
ccgctagatc

SEQ ID NO: 3709 - DNA, 10 bp, Artificial Sequence
  Synthetic Sequence
agcaacgaga

SEQ ID NO: 3710 - DNA, 10 bp, Artificial Sequence
  Synthetic Sequence
tctagtccag

SEQ ID NO: 3711 - DNA, 10 bp, Artificial Sequence
  Synthetic Sequence
ggaacggacg

SEQ ID NO: 3712 - DNA, 10 bp, Artificial Sequence
  Synthetic Sequence
gtgttgcacg

SEQ ID NO: 3713 - DNA, 10 bp, Artificial Sequence
  Synthetic Sequence
acgcatctcg

SEQ ID NO: 3714 - DNA, 10 bp, Artificial Sequence
  Synthetic Sequence
gcccatcata

SEQ ID NO: 3715 - DNA, 10 bp, Artificial Sequence
  Synthetic Sequence
gttgtcatct

SEQ ID NO: 3716 - DNA, 10 bp, Artificial Sequence
  Synthetic Sequence
cctttcctga

SEQ ID NO: 3717 - DNA, 10 bp, Artificial Sequence
  Synthetic Sequence
gtttcgatag

SEQ ID NO: 3718 - DNA, 10 bp, Artificial Sequence
  Synthetic Sequence
gggaaatgcg

SEQ ID NO: 3719 - DNA, 10 bp, Artificial Sequence
  Synthetic Sequence
agatcaaggc

SEQ ID NO: 3720 - DNA, 10 bp, Artificial Sequence
  Synthetic Sequence
ccttcccagc

SEQ ID NO: 3721 - DNA, 10 bp, Artificial Sequence
  Synthetic Sequence
ggaaacttgt

SEQ ID NO: 3722 - DNA, 10 bp, Artificial Sequence
  Synthetic Sequence
tattaggaga

SEQ ID NO: 3723 - DNA, 10 bp, Artificial Sequence
  Synthetic Sequence
atcaccctcc

SEQ ID NO: 3724 - DNA, 10 bp, Artificial Sequence
  Synthetic Sequence
ctggtgggct

SEQ ID NO: 3725 - DNA, 10 bp, Artificial Sequence
  Synthetic Sequence
aaggccctca

SEQ ID NO: 3726 - DNA, 10 bp, Artificial Sequence
  Synthetic Sequence
acggtccggt

SEQ ID NO: 3727 - DNA, 10 bp, Artificial Sequence
  Synthetic Sequence
accctatgtc

SEQ ID NO: 3728 - DNA, 10 bp, Artificial Sequence
  Synthetic Sequence
agggaacttc

SEQ ID NO: 3729 - DNA, 10 bp, Artificial Sequence
  Synthetic Sequence
tgattcaacg

SEQ ID NO: 3730 - DNA, 10 bp, Artificial Sequence
  Synthetic Sequence
agacttattc

SEQ ID NO: 3731 - DNA, 10 bp, Artificial Sequence
  Synthetic Sequence
gcctactact

SEQ ID NO: 3732 - DNA, 10 bp, Artificial Sequence
  Synthetic Sequence
aacgcggatc

SEQ ID NO: 3733 - DNA, 10 bp, Artificial Sequence
  Synthetic Sequence
gtcaccttta

SEQ ID NO: 3734 - DNA, 10 bp, Artificial Sequence
  Synthetic Sequence
tggaccagtc

SEQ ID NO: 3735 - DNA, 10 bp, Artificial Sequence
  Synthetic Sequence
gaatgtcacc

SEQ ID NO: 3736 - DNA, 10 bp, Artificial Sequence
  Synthetic Sequence
acttactcag

SEQ ID NO: 3737 - DNA, 10 bp, Artificial Sequence
  Synthetic Sequence
ccctgacgga

SEQ ID NO: 3738 - DNA, 10 bp, Artificial Sequence
  Synthetic Sequence
gctttcagta

SEQ ID NO: 3739 - DNA, 10 bp, Artificial Sequence
  Synthetic Sequence
gccagcctca

SEQ ID NO: 3740 - DNA, 10 bp, Artificial Sequence
  Synthetic Sequence
acaatcacaa

SEQ ID NO: 3741 - DNA, 10 bp, Artificial Sequence
  Synthetic Sequence
cgggatacac

SEQ ID NO: 3742 - DNA, 10 bp, Artificial Sequence
  Synthetic Sequence
gtgatatagg

SEQ ID NO: 3743 - DNA, 10 bp, Artificial Sequence
  Synthetic Sequence
cgtgtctgta

SEQ ID NO: 3744 - DNA, 10 bp, Artificial Sequence
  Synthetic Sequence
tgtgtacgca

SEQ ID NO: 3745 - DNA, 10 bp, Artificial Sequence
  Synthetic Sequence
cgtctattat

SEQ ID NO: 3746 - DNA, 10 bp, Artificial Sequence
  Synthetic Sequence
ggatacgtca

SEQ ID NO: 3747 - DNA, 10 bp, Artificial Sequence
  Synthetic Sequence
tgaccactct

SEQ ID NO: 3748 - DNA, 10 bp, Artificial Sequence
  Synthetic Sequence
atcgatccgg

SEQ ID NO: 3749 - DNA, 10 bp, Artificial Sequence
  Synthetic Sequence
cctcctgata

SEQ ID NO: 3750 - DNA, 10 bp, Artificial Sequence
  Synthetic Sequence
gctataaaca

SEQ ID NO: 3751 - DNA, 10 bp, Artificial Sequence
  Synthetic Sequence
accgctataa

SEQ ID NO: 3752 - DNA, 10 bp, Artificial Sequence
  Synthetic Sequence
ataaaccgaa

SEQ ID NO: 3753 - DNA, 10 bp, Artificial Sequence
  Synthetic Sequence
agcatatcat

SEQ ID NO: 3754 - DNA, 10 bp, Artificial Sequence
  Synthetic Sequence
taccgcacgg

SEQ ID NO: 3755 - DNA, 10 bp, Artificial Sequence
  Synthetic Sequence
ctacagtgat

SEQ ID NO: 3756 - DNA, 10 bp, Artificial Sequence
  Synthetic Sequence
tgtccagtgt

SEQ ID NO: 3757 - DNA, 10 bp, Artificial Sequence
  Synthetic Sequence
ttaaaggaag

SEQ ID NO: 3758 - DNA, 10 bp, Artificial Sequence
  Synthetic Sequence
cacaatcttg

SEQ ID NO: 3759 - DNA, 10 bp, Artificial Sequence
  Synthetic Sequence
atactccatt

SEQ ID NO: 3760 - DNA, 10 bp, Artificial Sequence
  Synthetic Sequence
cgctcgatga

SEQ ID NO: 3761 - DNA, 10 bp, Artificial Sequence
  Synthetic Sequence
attgacccaa

SEQ ID NO: 3762 - DNA, 10 bp, Artificial Sequence
  Synthetic Sequence
ggtgtggctc

SEQ ID NO: 3763 - DNA, 10 bp, Artificial Sequence
  Synthetic Sequence
catgcgcgac

SEQ ID NO: 3764 - DNA, 10 bp, Artificial Sequence
  Synthetic Sequence
ggacatttga

SEQ ID NO: 3765 - DNA, 10 bp, Artificial Sequence
  Synthetic Sequence
tgccagctta

SEQ ID NO: 3766 - DNA, 10 bp, Artificial Sequence
  Synthetic Sequence
atggtctgtc

SEQ ID NO: 3767 - DNA, 10 bp, Artificial Sequence
  Synthetic Sequence
ctctgcgagc

SEQ ID NO: 3768 - DNA, 10 bp, Artificial Sequence
  Synthetic Sequence
aaatcgcacg

SEQ ID NO: 3769 - DNA, 10 bp, Artificial Sequence
  Synthetic Sequence
cacaggatca

SEQ ID NO: 3770 - DNA, 10 bp, Artificial Sequence
  Synthetic Sequence
taacgatgtg

SEQ ID NO: 3771 - DNA, 10 bp, Artificial Sequence
  Synthetic Sequence
tttgccatga

SEQ ID NO: 3772 - DNA, 10 bp, Artificial Sequence
  Synthetic Sequence
gcacagccgt

SEQ ID NO: 3773 - DNA, 10 bp, Artificial Sequence
  Synthetic Sequence
aattcacagc

SEQ ID NO: 3774 - DNA, 10 bp, Artificial Sequence
  Synthetic Sequence
ttgcccaaga

SEQ ID NO: 3775 - DNA, 10 bp, Artificial Sequence
  Synthetic Sequence
ctttgtaaat

SEQ ID NO: 3776 - DNA, 10 bp, Artificial Sequence
  Synthetic Sequence
ggcctgcaga

SEQ ID NO: 3777 - DNA, 10 bp, Artificial Sequence
  Synthetic Sequence
agcggttcag

SEQ ID NO: 3778 - DNA, 10 bp, Artificial Sequence
  Synthetic Sequence
cctggtgaat

SEQ ID NO: 3779 - DNA, 10 bp, Artificial Sequence
  Synthetic Sequence
atgagatgtt

SEQ ID NO: 3780 - DNA, 10 bp, Artificial Sequence
  Synthetic Sequence
gtctaagctg

SEQ ID NO: 3781 - DNA, 10 bp, Artificial Sequence
  Synthetic Sequence
ctaatggctt

SEQ ID NO: 3782 - DNA, 10 bp, Artificial Sequence
  Synthetic Sequence
aggaacgcag

SEQ ID NO: 3783 - DNA, 10 bp, Artificial Sequence
  Synthetic Sequence
tatgggctaa

SEQ ID NO: 3784 - DNA, 10 bp, Artificial Sequence
  Synthetic Sequence
cgttataggt

SEQ ID NO: 3785 - DNA, 10 bp, Artificial Sequence
  Synthetic Sequence
tgttcgttgg

SEQ ID NO: 3786 - DNA, 10 bp, Artificial Sequence
  Synthetic Sequence
tgtgctaggg

SEQ ID NO: 3787 - DNA, 10 bp, Artificial Sequence
  Synthetic Sequence
ttaaacggga

SEQ ID NO: 3788 - DNA, 10 bp, Artificial Sequence
  Synthetic Sequence
ttcgatcgtt

SEQ ID NO: 3789 - DNA, 10 bp, Artificial Sequence
  Synthetic Sequence
cgctaggtcg

SEQ ID NO: 3790 - DNA, 10 bp, Artificial Sequence
  Synthetic Sequence
gtattcttag

SEQ ID NO: 3791 - DNA, 10 bp, Artificial Sequence
  Synthetic Sequence
aagaggaccc

SEQ ID NO: 3792 - DNA, 10 bp, Artificial Sequence
  Synthetic Sequence
atgccaacaa

SEQ ID NO: 3793 - DNA, 10 bp, Artificial Sequence
  Synthetic Sequence
tagtacggct

SEQ ID NO: 3794 - DNA, 10 bp, Artificial Sequence
  Synthetic Sequence
cccggttacc

SEQ ID NO: 3795 - DNA, 10 bp, Artificial Sequence
  Synthetic Sequence
tctacgggaa

SEQ ID NO: 3796 - DNA, 10 bp, Artificial Sequence
  Synthetic Sequence
tcagtgcgcg

SEQ ID NO: 3797 - DNA, 10 bp, Artificial Sequence
  Synthetic Sequence
aattcctgtt

SEQ ID NO: 3798 - DNA, 10 bp, Artificial Sequence
  Synthetic Sequence
gatagcacgc

SEQ ID NO: 3799 - DNA, 10 bp, Artificial Sequence
  Synthetic Sequence
tatggttaat

SEQ ID NO: 3800 - DNA, 10 bp, Artificial Sequence
  Synthetic Sequence
tgttagtaac

SEQ ID NO: 3801 - DNA, 10 bp, Artificial Sequence
  Synthetic Sequence
tgtggcacat

SEQ ID NO: 3802 - DNA, 10 bp, Artificial Sequence
  Synthetic Sequence
aaccagggtt

SEQ ID NO: 3803 - DNA, 10 bp, Artificial Sequence
  Synthetic Sequence
aacgaggacg

SEQ ID NO: 3804 - DNA, 10 bp, Artificial Sequence
  Synthetic Sequence
tggaaagcga

SEQ ID NO: 3805 - DNA, 10 bp, Artificial Sequence
  Synthetic Sequence
acaccgatcg

SEQ ID NO: 3806 - DNA, 10 bp, Artificial Sequence
  Synthetic Sequence
cagtgggttg

SEQ ID NO: 3807 - DNA, 10 bp, Artificial Sequence
  Synthetic Sequence
agacccgtag

SEQ ID NO: 3808 - DNA, 10 bp, Artificial Sequence
  Synthetic Sequence
tgcgctgcct

SEQ ID NO: 3809 - DNA, 10 bp, Artificial Sequence
  Synthetic Sequence
acacacttat

SEQ ID NO: 3810 - DNA, 10 bp, Artificial Sequence
  Synthetic Sequence
cataccgatg

SEQ ID NO: 3811 - DNA, 10 bp, Artificial Sequence
  Synthetic Sequence
tatatgttgc

SEQ ID NO: 3812 - DNA, 10 bp, Artificial Sequence
  Synthetic Sequence
tgtcaccggc

SEQ ID NO: 3813 - DNA, 10 bp, Artificial Sequence
  Synthetic Sequence
aaacacaggg

SEQ ID NO: 3814 - DNA, 10 bp, Artificial Sequence
  Synthetic Sequence
ccattgtaac

SEQ ID NO: 3815 - DNA, 10 bp, Artificial Sequence
  Synthetic Sequence
cctacaatac

SEQ ID NO: 3816 - DNA, 10 bp, Artificial Sequence
  Synthetic Sequence
ctggagcggt

SEQ ID NO: 3817 - DNA, 10 bp, Artificial Sequence
  Synthetic Sequence
aatcgacttc

SEQ ID NO: 3818 - DNA, 10 bp, Artificial Sequence
  Synthetic Sequence
accgaactta

SEQ ID NO: 3819 - DNA, 10 bp, Artificial Sequence
  Synthetic Sequence
actgtagtgt

SEQ ID NO: 3820 - DNA, 10 bp, Artificial Sequence
  Synthetic Sequence
ggcatttact

SEQ ID NO: 3821 - DNA, 10 bp, Artificial Sequence
  Synthetic Sequence
tttgagtgcg

SEQ ID NO: 3822 - DNA, 10 bp, Artificial Sequence
  Synthetic Sequence
aaggctgggc

SEQ ID NO: 3823 - DNA, 10 bp, Artificial Sequence
  Synthetic Sequence
acgatgctca

SEQ ID NO: 3824 - DNA, 10 bp, Artificial Sequence
  Synthetic Sequence
taataccatg

SEQ ID NO: 3825 - DNA, 10 bp, Artificial Sequence
  Synthetic Sequence
cctgcagagt

SEQ ID NO: 3826 - DNA, 10 bp, Artificial Sequence
  Synthetic Sequence
ccgccaagaa

SEQ ID NO: 3827 - DNA, 10 bp, Artificial Sequence
  Synthetic Sequence
cctatggcta

SEQ ID NO: 3828 - DNA, 10 bp, Artificial Sequence
  Synthetic Sequence
ctaaacacct

SEQ ID NO: 3829 - DNA, 10 bp, Artificial Sequence
  Synthetic Sequence
tacccaacca

SEQ ID NO: 3830 - DNA, 10 bp, Artificial Sequence
  Synthetic Sequence
acgtgctacg

SEQ ID NO: 3831 - DNA, 10 bp, Artificial Sequence
  Synthetic Sequence
taaagtgccc

SEQ ID NO: 3832 - DNA, 10 bp, Artificial Sequence
  Synthetic Sequence
acgtcttacc

SEQ ID NO: 3833 - DNA, 10 bp, Artificial Sequence
  Synthetic Sequence
acgcaatttg

SEQ ID NO: 3834 - DNA, 10 bp, Artificial Sequence
  Synthetic Sequence
ctcctattcc

SEQ ID NO: 3835 - DNA, 10 bp, Artificial Sequence
  Synthetic Sequence
gaagaagttc

SEQ ID NO: 3836 - DNA, 10 bp, Artificial Sequence
  Synthetic Sequence
gttccatcac

SEQ ID NO: 3837 - DNA, 10 bp, Artificial Sequence
  Synthetic Sequence
ccacacggtt

SEQ ID NO: 3838 - DNA, 10 bp, Artificial Sequence
  Synthetic Sequence
tacgcgcaag

SEQ ID NO: 3839 - DNA, 10 bp, Artificial Sequence
  Synthetic Sequence
tgtaatcatt

SEQ ID NO: 3840 - DNA, 10 bp, Artificial Sequence
  Synthetic Sequence
taatagatac

SEQ ID NO: 3841 - DNA, 10 bp, Artificial Sequence
  Synthetic Sequence
cctagcggtc

SEQ ID NO: 3842 - DNA, 10 bp, Artificial Sequence
  Synthetic Sequence
ggtactccaa

SEQ ID NO: 3843 - DNA, 10 bp, Artificial Sequence
  Synthetic Sequence
atattacgca

SEQ ID NO: 3844 - DNA, 10 bp, Artificial Sequence
  Synthetic Sequence
gtgccgagct

SEQ ID NO: 3845 - DNA, 10 bp, Artificial Sequence
  Synthetic Sequence
cggtaaggtt

SEQ ID NO: 3846 - DNA, 10 bp, Artificial Sequence
  Synthetic Sequence
tacttaatta

SEQ ID NO: 3847 - DNA, 10 bp, Artificial Sequence
  Synthetic Sequence
ttgcatggcg

SEQ ID NO: 3848 - DNA, 10 bp, Artificial Sequence
  Synthetic Sequence
ggtctgaccg

SEQ ID NO: 3849 - DNA, 10 bp, Artificial Sequence
  Synthetic Sequence
tccagccatt

SEQ ID NO: 3850 - DNA, 10 bp, Artificial Sequence
  Synthetic Sequence
gcacctttac

SEQ ID NO: 3851 - DNA, 10 bp, Artificial Sequence
  Synthetic Sequence
attgcagcga

SEQ ID NO: 3852 - DNA, 10 bp, Artificial Sequence
  Synthetic Sequence
ttcgcatttc

SEQ ID NO: 3853 - DNA, 10 bp, Artificial Sequence
  Synthetic Sequence
aggtgatagt

SEQ ID NO: 3854 - DNA, 10 bp, Artificial Sequence
  Synthetic Sequence
aactcacgga

SEQ ID NO: 3855 - DNA, 10 bp, Artificial Sequence
  Synthetic Sequence
cattatgttc

SEQ ID NO: 3856 - DNA, 10 bp, Artificial Sequence
  Synthetic Sequence
agaggcaaag

SEQ ID NO: 3857 - DNA, 10 bp, Artificial Sequence
  Synthetic Sequence
ttacacctag

SEQ ID NO: 3858 - DNA, 10 bp, Artificial Sequence
  Synthetic Sequence
gcacacgtta

SEQ ID NO: 3859 - DNA, 10 bp, Artificial Sequence
  Synthetic Sequence
aactaaccgt

SEQ ID NO: 3860 - DNA, 10 bp, Artificial Sequence
  Synthetic Sequence
acccgcagta

SEQ ID NO: 3861 - DNA, 10 bp, Artificial Sequence
  Synthetic Sequence
gatcagccat

SEQ ID NO: 3862 - DNA, 10 bp, Artificial Sequence
  Synthetic Sequence
catccttgga

SEQ ID NO: 3863 - DNA, 10 bp, Artificial Sequence
  Synthetic Sequence
ggtattaatt

SEQ ID NO: 3864 - DNA, 10 bp, Artificial Sequence
  Synthetic Sequence
ggcatagcgc

SEQ ID NO: 3865 - DNA, 10 bp, Artificial Sequence
  Synthetic Sequence
ggagttctta

SEQ ID NO: 3866 - DNA, 10 bp, Artificial Sequence
  Synthetic Sequence
gtgcttctgt

SEQ ID NO: 3867 - DNA, 10 bp, Artificial Sequence
  Synthetic Sequence
aagctcccta

SEQ ID NO: 3868 - DNA, 10 bp, Artificial Sequence
  Synthetic Sequence
gcgaacatcg

SEQ ID NO: 3869 - DNA, 10 bp, Artificial Sequence
  Synthetic Sequence
cagcagtcta

SEQ ID NO: 3870 - DNA, 10 bp, Artificial Sequence
  Synthetic Sequence
tccagtattt

SEQ ID NO: 3871 - DNA, 10 bp, Artificial Sequence
  Synthetic Sequence
tcctactgca

SEQ ID NO: 3872 - DNA, 10 bp, Artificial Sequence
  Synthetic Sequence
agtaagaatt

SEQ ID NO: 3873 - DNA, 10 bp, Artificial Sequence
  Synthetic Sequence
cttatttaca

SEQ ID NO: 3874 - DNA, 10 bp, Artificial Sequence
  Synthetic Sequence
gcaaccgggt

SEQ ID NO: 3875 - DNA, 10 bp, Artificial Sequence
  Synthetic Sequence
attcgtaagt

SEQ ID NO: 3876 - DNA, 10 bp, Artificial Sequence
  Synthetic Sequence
gtggacggga

SEQ ID NO: 3877 - DNA, 10 bp, Artificial Sequence
  Synthetic Sequence
acgtgaacta

SEQ ID NO: 3878 - DNA, 10 bp, Artificial Sequence
  Synthetic Sequence
agaagctcgg

SEQ ID NO: 3879 - DNA, 10 bp, Artificial Sequence
  Synthetic Sequence
cctgcagcac

SEQ ID NO: 3880 - DNA, 10 bp, Artificial Sequence
  Synthetic Sequence
tagttcttcg

SEQ ID NO: 3881 - DNA, 10 bp, Artificial Sequence
  Synthetic Sequence
cgagtggctg

SEQ ID NO: 3882 - DNA, 10 bp, Artificial Sequence
  Synthetic Sequence
tgataaatct

SEQ ID NO: 3883 - DNA, 10 bp, Artificial Sequence
  Synthetic Sequence
acgcatgaaa

SEQ ID NO: 3884 - DNA, 10 bp, Artificial Sequence
  Synthetic Sequence
atgcggcgtc

SEQ ID NO: 3885 - DNA, 10 bp, Artificial Sequence
  Synthetic Sequence
agtgcatttg

SEQ ID NO: 3886 - DNA, 10 bp, Artificial Sequence
  Synthetic Sequence
agctagcgcg

SEQ ID NO: 3887 - DNA, 10 bp, Artificial Sequence
  Synthetic Sequence
atggtgccta

SEQ ID NO: 3888 - DNA, 10 bp, Artificial Sequence
  Synthetic Sequence
aaggtgatcc

SEQ ID NO: 3889 - DNA, 10 bp, Artificial Sequence
  Synthetic Sequence
tgaataccat

SEQ ID NO: 3890 - DNA, 10 bp, Artificial Sequence
  Synthetic Sequence
taccctagaa

SEQ ID NO: 3891 - DNA, 10 bp, Artificial Sequence
  Synthetic Sequence
cattgcgggc

SEQ ID NO: 3892 - DNA, 10 bp, Artificial Sequence
  Synthetic Sequence
tcggcgtatg

SEQ ID NO: 3893 - DNA, 10 bp, Artificial Sequence
  Synthetic Sequence
ggcgatagca

SEQ ID NO: 3894 - DNA, 10 bp, Artificial Sequence
  Synthetic Sequence
cagcttggta

SEQ ID NO: 3895 - DNA, 10 bp, Artificial Sequence
  Synthetic Sequence
gggaagcagt

SEQ ID NO: 3896 - DNA, 10 bp, Artificial Sequence
  Synthetic Sequence
ttatgaataa

SEQ ID NO: 3897 - DNA, 10 bp, Artificial Sequence
  Synthetic Sequence
atagcaacct

SEQ ID NO: 3898 - DNA, 10 bp, Artificial Sequence
  Synthetic Sequence
gatgcgagtc

SEQ ID NO: 3899 - DNA, 10 bp, Artificial Sequence
  Synthetic Sequence
cacttgctat

SEQ ID NO: 3900 - DNA, 10 bp, Artificial Sequence
  Synthetic Sequence
agggacccga

SEQ ID NO: 3901 - DNA, 10 bp, Artificial Sequence
  Synthetic Sequence
ggcggtccaa

SEQ ID NO: 3902 - DNA, 10 bp, Artificial Sequence
  Synthetic Sequence
tgggagcagc

SEQ ID NO: 3903 - DNA, 10 bp, Artificial Sequence
  Synthetic Sequence
catgaaaggg

SEQ ID NO: 3904 - DNA, 10 bp, Artificial Sequence
  Synthetic Sequence
ttctgcgaag

SEQ ID NO: 3905 - DNA, 10 bp, Artificial Sequence
  Synthetic Sequence
gcgtttgttc

SEQ ID NO: 3906 - DNA, 10 bp, Artificial Sequence
  Synthetic Sequence
ttgggaccgc

SEQ ID NO: 3907 - DNA, 10 bp, Artificial Sequence
  Synthetic Sequence
ggtagatctc

SEQ ID NO: 3908 - DNA, 10 bp, Artificial Sequence
  Synthetic Sequence
ttagtttgtg

SEQ ID NO: 3909 - DNA, 10 bp, Artificial Sequence
  Synthetic Sequence
ccctctcaaa

SEQ ID NO: 3910 - DNA, 10 bp, Artificial Sequence
  Synthetic Sequence
caactcggac

SEQ ID NO: 3911 - DNA, 10 bp, Artificial Sequence
  Synthetic Sequence
gtgccaatag

SEQ ID NO: 3912 - DNA, 10 bp, Artificial Sequence
  Synthetic Sequence
aagagactgg

SEQ ID NO: 3913 - DNA, 10 bp, Artificial Sequence
  Synthetic Sequence
tttgaaatac

SEQ ID NO: 3914 - DNA, 10 bp, Artificial Sequence
  Synthetic Sequence
ataattactc

SEQ ID NO: 3915 - DNA, 10 bp, Artificial Sequence
  Synthetic Sequence
tcgagaagac

SEQ ID NO: 3916 - DNA, 10 bp, Artificial Sequence
  Synthetic Sequence
gctatcgatt

SEQ ID NO: 3917 - DNA, 10 bp, Artificial Sequence
  Synthetic Sequence
cggatgattg

SEQ ID NO: 3918 - DNA, 10 bp, Artificial Sequence
  Synthetic Sequence
tataatgttt

SEQ ID NO: 3919 - DNA, 10 bp, Artificial Sequence
  Synthetic Sequence
gttctggcca

SEQ ID NO: 3920 - DNA, 10 bp, Artificial Sequence
  Synthetic Sequence
atcagttggg

SEQ ID NO: 3921 - DNA, 10 bp, Artificial Sequence
  Synthetic Sequence
ctcacgcacg

SEQ ID NO: 3922 - DNA, 10 bp, Artificial Sequence
  Synthetic Sequence
tctatctatg

SEQ ID NO: 3923 - DNA, 10 bp, Artificial Sequence
  Synthetic Sequence
gacacgatgg

SEQ ID NO: 3924 - DNA, 10 bp, Artificial Sequence
  Synthetic Sequence
tcagagcaag

SEQ ID NO: 3925 - DNA, 10 bp, Artificial Sequence
  Synthetic Sequence
actgcttagc

SEQ ID NO: 3926 - DNA, 10 bp, Artificial Sequence
  Synthetic Sequence
gctgagagac

SEQ ID NO: 3927 - DNA, 10 bp, Artificial Sequence
  Synthetic Sequence
ctcagttcga

SEQ ID NO: 3928 - DNA, 10 bp, Artificial Sequence
  Synthetic Sequence
atcttctctg

SEQ ID NO: 3929 - DNA, 10 bp, Artificial Sequence
  Synthetic Sequence
tttccttgct

SEQ ID NO: 3930 - DNA, 10 bp, Artificial Sequence
  Synthetic Sequence
agaaaggccg

SEQ ID NO: 3931 - DNA, 10 bp, Artificial Sequence
  Synthetic Sequence
ctggctgcta

SEQ ID NO: 3932 - DNA, 10 bp, Artificial Sequence
  Synthetic Sequence
catcacttga

SEQ ID NO: 3933 - DNA, 10 bp, Artificial Sequence
  Synthetic Sequence
gacccataag

SEQ ID NO: 3934 - DNA, 10 bp, Artificial Sequence
  Synthetic Sequence
caggaaagat

SEQ ID NO: 3935 - DNA, 10 bp, Artificial Sequence
  Synthetic Sequence
gagccctacg

SEQ ID NO: 3936 - DNA, 10 bp, Artificial Sequence
  Synthetic Sequence
agtgagttgg

SEQ ID NO: 3937 - DNA, 10 bp, Artificial Sequence
  Synthetic Sequence
gccaatgctg

SEQ ID NO: 3938 - DNA, 10 bp, Artificial Sequence
  Synthetic Sequence
accggccgtt

SEQ ID NO: 3939 - DNA, 10 bp, Artificial Sequence
  Synthetic Sequence
gaagctgcca

SEQ ID NO: 3940 - DNA, 10 bp, Artificial Sequence
  Synthetic Sequence
ggctacactt

SEQ ID NO: 3941 - DNA, 10 bp, Artificial Sequence
  Synthetic Sequence
tgtcagaatc

SEQ ID NO: 3942 - DNA, 10 bp, Artificial Sequence
  Synthetic Sequence
tctcagccac

SEQ ID NO: 3943 - DNA, 10 bp, Artificial Sequence
  Synthetic Sequence
accgcctcag

SEQ ID NO: 3944 - DNA, 10 bp, Artificial Sequence
  Synthetic Sequence
tataggtgaa

SEQ ID NO: 3945 - DNA, 10 bp, Artificial Sequence
  Synthetic Sequence
taatcgcatc

SEQ ID NO: 3946 - DNA, 10 bp, Artificial Sequence
  Synthetic Sequence
tcgccactcc

SEQ ID NO: 3947 - DNA, 10 bp, Artificial Sequence
  Synthetic Sequence
gaagctttct

SEQ ID NO: 3948 - DNA, 10 bp, Artificial Sequence
  Synthetic Sequence
gggacgcaca

SEQ ID NO: 3949 - DNA, 10 bp, Artificial Sequence
  Synthetic Sequence
gattagttgc

SEQ ID NO: 3950 - DNA, 10 bp, Artificial Sequence
  Synthetic Sequence
ggattatcct

SEQ ID NO: 3951 - DNA, 10 bp, Artificial Sequence
  Synthetic Sequence
ttatggcggg

SEQ ID NO: 3952 - DNA, 10 bp, Artificial Sequence
  Synthetic Sequence
ggacacacgg

SEQ ID NO: 3953 - DNA, 10 bp, Artificial Sequence
  Synthetic Sequence
actgatgcgg

SEQ ID NO: 3954 - DNA, 10 bp, Artificial Sequence
  Synthetic Sequence
ggttccgtcc

SEQ ID NO: 3955 - DNA, 10 bp, Artificial Sequence
  Synthetic Sequence
ccagctactg

SEQ ID NO: 3956 - DNA, 10 bp, Artificial Sequence
  Synthetic Sequence
acatccgttt

SEQ ID NO: 3957 - DNA, 10 bp, Artificial Sequence
  Synthetic Sequence
tggtaatatt

SEQ ID NO: 3958 - DNA, 10 bp, Artificial Sequence
  Synthetic Sequence
tatttctcct

SEQ ID NO: 3959 - DNA, 10 bp, Artificial Sequence
  Synthetic Sequence
acgtgtccgt

SEQ ID NO: 3960 - DNA, 10 bp, Artificial Sequence
  Synthetic Sequence
ctcaatgtat

SEQ ID NO: 3961 - DNA, 10 bp, Artificial Sequence
  Synthetic Sequence
aaagtccagg

SEQ ID NO: 3962 - DNA, 10 bp, Artificial Sequence
  Synthetic Sequence
cggagacaga

SEQ ID NO: 3963 - DNA, 10 bp, Artificial Sequence
  Synthetic Sequence
tttgcttcaa

SEQ ID NO: 3964 - DNA, 10 bp, Artificial Sequence
  Synthetic Sequence
tagaacttag

SEQ ID NO: 3965 - DNA, 10 bp, Artificial Sequence
  Synthetic Sequence
agagatcact

SEQ ID NO: 3966 - DNA, 10 bp, Artificial Sequence
  Synthetic Sequence
tgcgtaggct

SEQ ID NO: 3967 - DNA, 10 bp, Artificial Sequence
  Synthetic Sequence
gtgtgactta

SEQ ID NO: 3968 - DNA, 10 bp, Artificial Sequence
  Synthetic Sequence
tggtttctaa

SEQ ID NO: 3969 - DNA, 10 bp, Artificial Sequence
  Synthetic Sequence
ccaagtattc

SEQ ID NO: 3970 - DNA, 10 bp, Artificial Sequence
  Synthetic Sequence
tgcgtcgcac

SEQ ID NO: 3971 - DNA, 10 bp, Artificial Sequence
  Synthetic Sequence
aaagttgttc

SEQ ID NO: 3972 - DNA, 10 bp, Artificial Sequence
  Synthetic Sequence
aaccgaccca

SEQ ID NO: 3973 - DNA, 10 bp, Artificial Sequence
  Synthetic Sequence
cttaatacgc

SEQ ID NO: 3974 - DNA, 10 bp, Artificial Sequence
  Synthetic Sequence
accgcagcca

SEQ ID NO: 3975 - DNA, 10 bp, Artificial Sequence
  Synthetic Sequence
gtaaagtgga

SEQ ID NO: 3976 - DNA, 10 bp, Artificial Sequence
  Synthetic Sequence
acacaaagga

SEQ ID NO: 3977 - DNA, 10 bp, Artificial Sequence
  Synthetic Sequence
tggagtgcgc

SEQ ID NO: 3978 - DNA, 10 bp, Artificial Sequence
  Synthetic Sequence
ctcgagtata

SEQ ID NO: 3979 - DNA, 10 bp, Artificial Sequence
  Synthetic Sequence
agttaacgac

SEQ ID NO: 3980 - DNA, 10 bp, Artificial Sequence
  Synthetic Sequence
gacttatgag

SEQ ID NO: 3981 - DNA, 10 bp, Artificial Sequence
  Synthetic Sequence
ggtggctaat

SEQ ID NO: 3982 - DNA, 10 bp, Artificial Sequence
  Synthetic Sequence
tcacgcatgt

SEQ ID NO: 3983 - DNA, 10 bp, Artificial Sequence
  Synthetic Sequence
ggaccgtctg

SEQ ID NO: 3984 - DNA, 10 bp, Artificial Sequence
  Synthetic Sequence
gctagtacac

SEQ ID NO: 3985 - DNA, 10 bp, Artificial Sequence
  Synthetic Sequence
agtttggtaa

SEQ ID NO: 3986 - DNA, 10 bp, Artificial Sequence
  Synthetic Sequence
agagaagagc

SEQ ID NO: 3987 - DNA, 10 bp, Artificial Sequence
  Synthetic Sequence
tatataacat

SEQ ID NO: 3988 - DNA, 10 bp, Artificial Sequence
  Synthetic Sequence
gtttcaagtg

SEQ ID NO: 3989 - DNA, 10 bp, Artificial Sequence
  Synthetic Sequence
ctcaacggta

SEQ ID NO: 3990 - DNA, 10 bp, Artificial Sequence
  Synthetic Sequence
gaatgctttg

SEQ ID NO: 3991 - DNA, 10 bp, Artificial Sequence
  Synthetic Sequence
ccaagggtcg

SEQ ID NO: 3992 - DNA, 10 bp, Artificial Sequence
  Synthetic Sequence
ttcatcagtt

SEQ ID NO: 3993 - DNA, 10 bp, Artificial Sequence
  Synthetic Sequence
ctttcagtcg

SEQ ID NO: 3994 - DNA, 10 bp, Artificial Sequence
  Synthetic Sequence
gtaatgggaa

SEQ ID NO: 3995 - DNA, 10 bp, Artificial Sequence
  Synthetic Sequence
cggaagtcgc

SEQ ID NO: 3996 - DNA, 10 bp, Artificial Sequence
  Synthetic Sequence
aagtgtatgt

SEQ ID NO: 3997 - DNA, 10 bp, Artificial Sequence
  Synthetic Sequence
tttgtcaata

SEQ ID NO: 3998 - DNA, 10 bp, Artificial Sequence
  Synthetic Sequence
agagccagca

SEQ ID NO: 3999 - DNA, 10 bp, Artificial Sequence
  Synthetic Sequence
gtcaacctat

SEQ ID NO: 4000 - DNA, 10 bp, Artificial Sequence
  Synthetic Sequence
tataaatata

SEQ ID NO: 4001 - DNA, 10 bp, Artificial Sequence
  Synthetic Sequence
gagatttata

SEQ ID NO: 4002 - DNA, 10 bp, Artificial Sequence
  Synthetic Sequence
caaggacaag

SEQ ID NO: 4003 - DNA, 10 bp, Artificial Sequence
  Synthetic Sequence
agcgatcggc

SEQ ID NO: 4004 - DNA, 10 bp, Artificial Sequence
  Synthetic Sequence
agaacactcc

SEQ ID NO: 4005 - DNA, 10 bp, Artificial Sequence
  Synthetic Sequence
tagggtgctc

SEQ ID NO: 4006 - DNA, 10 bp, Artificial Sequence
  Synthetic Sequence
atgggtttct

SEQ ID NO: 4007 - DNA, 10 bp, Artificial Sequence
  Synthetic Sequence
tgaatatgag

SEQ ID NO: 4008 - DNA, 10 bp, Artificial Sequence
  Synthetic Sequence
caatggacac

SEQ ID NO: 4009 - DNA, 10 bp, Artificial Sequence
  Synthetic Sequence
ctagtgctac

SEQ ID NO: 4010 - DNA, 10 bp, Artificial Sequence
  Synthetic Sequence
taggttagat

SEQ ID NO: 4011 - DNA, 10 bp, Artificial Sequence
  Synthetic Sequence
cacttctggc

SEQ ID NO: 4012 - DNA, 10 bp, Artificial Sequence
  Synthetic Sequence
cttctgactt

SEQ ID NO: 4013 - DNA, 10 bp, Artificial Sequence
  Synthetic Sequence
acacttacga

SEQ ID NO: 4014 - DNA, 10 bp, Artificial Sequence
  Synthetic Sequence
cgcaaacgaa

SEQ ID NO: 4015 - DNA, 10 bp, Artificial Sequence
  Synthetic Sequence
tcgaacatgt

SEQ ID NO: 4016 - DNA, 10 bp, Artificial Sequence
  Synthetic Sequence
agcgtgcgtt

SEQ ID NO: 4017 - DNA, 10 bp, Artificial Sequence
  Synthetic Sequence
gttcaattga

SEQ ID NO: 4018 - DNA, 10 bp, Artificial Sequence
  Synthetic Sequence
gctgtccacc

SEQ ID NO: 4019 - DNA, 10 bp, Artificial Sequence
  Synthetic Sequence
caaaggagtg

SEQ ID NO: 4020 - DNA, 10 bp, Artificial Sequence
  Synthetic Sequence
cgaacgcgga

SEQ ID NO: 4021 - DNA, 10 bp, Artificial Sequence
  Synthetic Sequence
tggcgacacc

SEQ ID NO: 4022 - DNA, 10 bp, Artificial Sequence
  Synthetic Sequence
aacctcactg

SEQ ID NO: 4023 - DNA, 10 bp, Artificial Sequence
  Synthetic Sequence
tgccggtttg

SEQ ID NO: 4024 - DNA, 10 bp, Artificial Sequence
  Synthetic Sequence
ggagcccttc

SEQ ID NO: 4025 - DNA, 10 bp, Artificial Sequence
  Synthetic Sequence
tcttccagac

SEQ ID NO: 4026 - DNA, 10 bp, Artificial Sequence
  Synthetic Sequence
ctttcattat

SEQ ID NO: 4027 - DNA, 10 bp, Artificial Sequence
  Synthetic Sequence
tgttctctat

SEQ ID NO: 4028 - DNA, 10 bp, Artificial Sequence
  Synthetic Sequence
gcatcggcct

SEQ ID NO: 4029 - DNA, 10 bp, Artificial Sequence
  Synthetic Sequence
gtgcgggtga

SEQ ID NO: 4030 - DNA, 10 bp, Artificial Sequence
  Synthetic Sequence
ttacgcagct

SEQ ID NO: 4031 - DNA, 10 bp, Artificial Sequence
  Synthetic Sequence
tcgctgtgtc

SEQ ID NO: 4032 - DNA, 10 bp, Artificial Sequence
  Synthetic Sequence
ccgggtaagc

SEQ ID NO: 4033 - DNA, 10 bp, Artificial Sequence
  Synthetic Sequence
cgggttgatc

SEQ ID NO: 4034 - DNA, 10 bp, Artificial Sequence
  Synthetic Sequence
ctgccgcatt

SEQ ID NO: 4035 - DNA, 10 bp, Artificial Sequence
  Synthetic Sequence
gcacttcgtg

SEQ ID NO: 4036 - DNA, 10 bp, Artificial Sequence
  Synthetic Sequence
taaggcgagc

SEQ ID NO: 4037 - DNA, 10 bp, Artificial Sequence
  Synthetic Sequence
ctacactccc

SEQ ID NO: 4038 - DNA, 10 bp, Artificial Sequence
  Synthetic Sequence
agcgtgttga

SEQ ID NO: 4039 - DNA, 10 bp, Artificial Sequence
  Synthetic Sequence
tacgtgcccg

SEQ ID NO: 4040 - DNA, 10 bp, Artificial Sequence
  Synthetic Sequence
gatgtcgcgg

SEQ ID NO: 4041 - DNA, 10 bp, Artificial Sequence
  Synthetic Sequence
gactgtctag

SEQ ID NO: 4042 - DNA, 10 bp, Artificial Sequence
  Synthetic Sequence
ctatccgctc

SEQ ID NO: 4043 - DNA, 10 bp, Artificial Sequence
  Synthetic Sequence
gctaattgtt

SEQ ID NO: 4044 - DNA, 10 bp, Artificial Sequence
  Synthetic Sequence
tatagatacg

SEQ ID NO: 4045 - DNA, 10 bp, Artificial Sequence
  Synthetic Sequence
atcctggctg

SEQ ID NO: 4046 - DNA, 10 bp, Artificial Sequence
  Synthetic Sequence
ttaagcctgg

SEQ ID NO: 4047 - DNA, 10 bp, Artificial Sequence
  Synthetic Sequence
tttgatactc

SEQ ID NO: 4048 - DNA, 10 bp, Artificial Sequence
  Synthetic Sequence
gtgatccgga

SEQ ID NO: 4049 - DNA, 10 bp, Artificial Sequence
  Synthetic Sequence
tagaaggagg

SEQ ID NO: 4050 - DNA, 10 bp, Artificial Sequence
  Synthetic Sequence
cagaatgagt

SEQ ID NO: 4051 - DNA, 10 bp, Artificial Sequence
  Synthetic Sequence
ctgggaagcc

SEQ ID NO: 4052 - DNA, 10 bp, Artificial Sequence
  Synthetic Sequence
ttcctaaacg

SEQ ID NO: 4053 - DNA, 10 bp, Artificial Sequence
  Synthetic Sequence
tcactcccag

SEQ ID NO: 4054 - DNA, 10 bp, Artificial Sequence
  Synthetic Sequence
ggccgtatga

SEQ ID NO: 4055 - DNA, 10 bp, Artificial Sequence
  Synthetic Sequence
tggtagttgc

SEQ ID NO: 4056 - DNA, 10 bp, Artificial Sequence
  Synthetic Sequence
tgccatgtat

SEQ ID NO: 4057 - DNA, 10 bp, Artificial Sequence
  Synthetic Sequence
cccggcgatt

SEQ ID NO: 4058 - DNA, 10 bp, Artificial Sequence
  Synthetic Sequence
tttagctcct

SEQ ID NO: 4059 - DNA, 10 bp, Artificial Sequence
  Synthetic Sequence
aggcgccaat

SEQ ID NO: 4060 - DNA, 10 bp, Artificial Sequence
  Synthetic Sequence
ttccgctcta

SEQ ID NO: 4061 - DNA, 10 bp, Artificial Sequence
  Synthetic Sequence
ttacctaggg

SEQ ID NO: 4062 - DNA, 10 bp, Artificial Sequence
  Synthetic Sequence
agtgcttaca

SEQ ID NO: 4063 - DNA, 10 bp, Artificial Sequence
  Synthetic Sequence
catctcgcat

SEQ ID NO: 4064 - DNA, 10 bp, Artificial Sequence
  Synthetic Sequence
agggccatcg

SEQ ID NO: 4065 - DNA, 10 bp, Artificial Sequence
  Synthetic Sequence
gccggtacta

SEQ ID NO: 4066 - DNA, 10 bp, Artificial Sequence
  Synthetic Sequence
cgtctgcgac

SEQ ID NO: 4067 - DNA, 10 bp, Artificial Sequence
  Synthetic Sequence
atatgtctat

SEQ ID NO: 4068 - DNA, 10 bp, Artificial Sequence
  Synthetic Sequence
ccggactttc

SEQ ID NO: 4069 - DNA, 10 bp, Artificial Sequence
  Synthetic Sequence
gcctagcttt

SEQ ID NO: 4070 - DNA, 10 bp, Artificial Sequence
  Synthetic Sequence
agtgtactgc

SEQ ID NO: 4071 - DNA, 10 bp, Artificial Sequence
  Synthetic Sequence
ccgcaattgc

SEQ ID NO: 4072 - DNA, 10 bp, Artificial Sequence
  Synthetic Sequence
gaattatctg

SEQ ID NO: 4073 - DNA, 10 bp, Artificial Sequence
  Synthetic Sequence
aagttataag

SEQ ID NO: 4074 - DNA, 10 bp, Artificial Sequence
  Synthetic Sequence
actggaagat

SEQ ID NO: 4075 - DNA, 10 bp, Artificial Sequence
  Synthetic Sequence
cagatctttc

SEQ ID NO: 4076 - DNA, 10 bp, Artificial Sequence
  Synthetic Sequence
actgtgtagg

SEQ ID NO: 4077 - DNA, 10 bp, Artificial Sequence
  Synthetic Sequence
atcgtaaatg

SEQ ID NO: 4078 - DNA, 10 bp, Artificial Sequence
  Synthetic Sequence
tagcatgctt

SEQ ID NO: 4079 - DNA, 10 bp, Artificial Sequence
  Synthetic Sequence
cgatgtcgac

SEQ ID NO: 4080 - DNA, 10 bp, Artificial Sequence
  Synthetic Sequence
gcatggccta

SEQ ID NO: 4081 - DNA, 10 bp, Artificial Sequence
  Synthetic Sequence
tttagcatta

SEQ ID NO: 4082 - DNA, 10 bp, Artificial Sequence
  Synthetic Sequence
gcaacgtcca

SEQ ID NO: 4083 - DNA, 10 bp, Artificial Sequence
  Synthetic Sequence
ctcctggacg

SEQ ID NO: 4084 - DNA, 10 bp, Artificial Sequence
  Synthetic Sequence
gtgacatcca

SEQ ID NO: 4085 - DNA, 10 bp, Artificial Sequence
  Synthetic Sequence
gccttccgac

SEQ ID NO: 4086 - DNA, 10 bp, Artificial Sequence
  Synthetic Sequence
tagagttaag

SEQ ID NO: 4087 - DNA, 10 bp, Artificial Sequence
  Synthetic Sequence
cgcgtacgtg

SEQ ID NO: 4088 - DNA, 10 bp, Artificial Sequence
  Synthetic Sequence
gaccgaaatg

SEQ ID NO: 4089 - DNA, 10 bp, Artificial Sequence
  Synthetic Sequence
cttggagcta

SEQ ID NO: 4090 - DNA, 10 bp, Artificial Sequence
  Synthetic Sequence
actccatcta

SEQ ID NO: 4091 - DNA, 10 bp, Artificial Sequence
  Synthetic Sequence
cttcgctagg

SEQ ID NO: 4092 - DNA, 10 bp, Artificial Sequence
  Synthetic Sequence
gagtagccta

SEQ ID NO: 4093 - DNA, 10 bp, Artificial Sequence
  Synthetic Sequence
aaatcttaaa

SEQ ID NO: 4094 - DNA, 10 bp, Artificial Sequence
  Synthetic Sequence
ctaaatctgt

SEQ ID NO: 4095 - DNA, 10 bp, Artificial Sequence
  Synthetic Sequence
atacactaaa

SEQ ID NO: 4096 - DNA, 10 bp, Artificial Sequence
  Synthetic Sequence
agtcttccgc

SEQ ID NO: 4097 - DNA, 10 bp, Artificial Sequence
  Synthetic Sequence
ctacttgatg

SEQ ID NO: 4098 - DNA, 10 bp, Artificial Sequence
  Synthetic Sequence
atttattcta

SEQ ID NO: 4099 - DNA, 10 bp, Artificial Sequence
  Synthetic Sequence
aggacggcat

SEQ ID NO: 4100 - DNA, 10 bp, Artificial Sequence
  Synthetic Sequence
atcgtgcaga

SEQ ID NO: 4101 - DNA, 10 bp, Artificial Sequence
  Synthetic Sequence
gcctacgtcc

SEQ ID NO: 4102 - DNA, 10 bp, Artificial Sequence
  Synthetic Sequence
atggccatgt

SEQ ID NO: 4103 - DNA, 10 bp, Artificial Sequence
  Synthetic Sequence
taatcgcgaa

SEQ ID NO: 4104 - DNA, 10 bp, Artificial Sequence
  Synthetic Sequence
aatttacggg

SEQ ID NO: 4105 - DNA, 10 bp, Artificial Sequence
  Synthetic Sequence
caaatcttat

SEQ ID NO: 4106 - DNA, 10 bp, Artificial Sequence
  Synthetic Sequence
gtgagtttaa

SEQ ID NO: 4107 - DNA, 10 bp, Artificial Sequence
  Synthetic Sequence
agtagcgcgc

SEQ ID NO: 4108 - DNA, 10 bp, Artificial Sequence
  Synthetic Sequence
tctattggca

SEQ ID NO: 4109 - DNA, 10 bp, Artificial Sequence
  Synthetic Sequence
tgtggtctgg

SEQ ID NO: 4110 - DNA, 10 bp, Artificial Sequence
  Synthetic Sequence
tcgcgaaatg

SEQ ID NO: 4111 - DNA, 10 bp, Artificial Sequence
  Synthetic Sequence
tttctaaggt

SEQ ID NO: 4112 - DNA, 10 bp, Artificial Sequence
  Synthetic Sequence
atcacgatac

SEQ ID NO: 4113 - DNA, 10 bp, Artificial Sequence
  Synthetic Sequence
tgttgaaata

SEQ ID NO: 4114 - DNA, 10 bp, Artificial Sequence
  Synthetic Sequence
tacgatcatg

SEQ ID NO: 4115 - DNA, 10 bp, Artificial Sequence
  Synthetic Sequence
tgcagcccaa

SEQ ID NO: 4116 - DNA, 10 bp, Artificial Sequence
  Synthetic Sequence
acaacgcgaa

SEQ ID NO: 4117 - DNA, 10 bp, Artificial Sequence
  Synthetic Sequence
gagcgagcca

SEQ ID NO: 4118 - DNA, 10 bp, Artificial Sequence
  Synthetic Sequence
gctgctgtta

SEQ ID NO: 4119 - DNA, 10 bp, Artificial Sequence
  Synthetic Sequence
gtcgggactg

SEQ ID NO: 4120 - DNA, 10 bp, Artificial Sequence
  Synthetic Sequence
tctacgccgc

SEQ ID NO: 4121 - DNA, 10 bp, Artificial Sequence
  Synthetic Sequence
ctcatttaac

SEQ ID NO: 4122 - DNA, 10 bp, Artificial Sequence
  Synthetic Sequence
cgattctctt

SEQ ID NO: 4123 - DNA, 10 bp, Artificial Sequence
  Synthetic Sequence
gagaaagtag

SEQ ID NO: 4124 - DNA, 10 bp, Artificial Sequence
  Synthetic Sequence
gtggactccc

SEQ ID NO: 4125 - DNA, 10 bp, Artificial Sequence
  Synthetic Sequence
taggcctccc

SEQ ID NO: 4126 - DNA, 10 bp, Artificial Sequence
  Synthetic Sequence
cattcccggg

SEQ ID NO: 4127 - DNA, 10 bp, Artificial Sequence
  Synthetic Sequence
cttcttcgag

SEQ ID NO: 4128 - DNA, 10 bp, Artificial Sequence
  Synthetic Sequence
gtatagatct

SEQ ID NO: 4129 - DNA, 10 bp, Artificial Sequence
  Synthetic Sequence
caaatggtac

SEQ ID NO: 4130 - DNA, 10 bp, Artificial Sequence
  Synthetic Sequence
atagacagag

SEQ ID NO: 4131 - DNA, 10 bp, Artificial Sequence
  Synthetic Sequence
ttgtaaagcc

SEQ ID NO: 4132 - DNA, 10 bp, Artificial Sequence
  Synthetic Sequence
ttaactgatt

SEQ ID NO: 4133 - DNA, 10 bp, Artificial Sequence
  Synthetic Sequence
cctgatagaa

SEQ ID NO: 4134 - DNA, 10 bp, Artificial Sequence
  Synthetic Sequence
gactgggctg

SEQ ID NO: 4135 - DNA, 10 bp, Artificial Sequence
  Synthetic Sequence
ggagctcgag

SEQ ID NO: 4136 - DNA, 10 bp, Artificial Sequence
  Synthetic Sequence
aagaacttga

SEQ ID NO: 4137 - DNA, 10 bp, Artificial Sequence
  Synthetic Sequence
tggaaatcct

SEQ ID NO: 4138 - DNA, 10 bp, Artificial Sequence
  Synthetic Sequence
aaactctata

SEQ ID NO: 4139 - DNA, 10 bp, Artificial Sequence
  Synthetic Sequence
ccgaataatc

SEQ ID NO: 4140 - DNA, 10 bp, Artificial Sequence
  Synthetic Sequence
ctgattgtgg

SEQ ID NO: 4141 - DNA, 10 bp, Artificial Sequence
  Synthetic Sequence
aatttggttc

SEQ ID NO: 4142 - DNA, 10 bp, Artificial Sequence
  Synthetic Sequence
aatctagagg

SEQ ID NO: 4143 - DNA, 10 bp, Artificial Sequence
  Synthetic Sequence
caaacaacgt

SEQ ID NO: 4144 - DNA, 10 bp, Artificial Sequence
  Synthetic Sequence
ccggcattaa

SEQ ID NO: 4145 - DNA, 10 bp, Artificial Sequence
  Synthetic Sequence
aacaaatttg

SEQ ID NO: 4146 - DNA, 10 bp, Artificial Sequence
  Synthetic Sequence
cagccgacaa

SEQ ID NO: 4147 - DNA, 10 bp, Artificial Sequence
  Synthetic Sequence
caatgcgtac

SEQ ID NO: 4148 - DNA, 10 bp, Artificial Sequence
  Synthetic Sequence
tggacacgac

SEQ ID NO: 4149 - DNA, 10 bp, Artificial Sequence
  Synthetic Sequence
tgtggcgagg

SEQ ID NO: 4150 - DNA, 10 bp, Artificial Sequence
  Synthetic Sequence
atcccatcgc

SEQ ID NO: 4151 - DNA, 10 bp, Artificial Sequence
  Synthetic Sequence
gcggaccatc

SEQ ID NO: 4152 - DNA, 10 bp, Artificial Sequence
  Synthetic Sequence
tcaatacgcc

SEQ ID NO: 4153 - DNA, 10 bp, Artificial Sequence
  Synthetic Sequence
gctttgcgtt

SEQ ID NO: 4154 - DNA, 10 bp, Artificial Sequence
  Synthetic Sequence
cggattgacg

SEQ ID NO: 4155 - DNA, 10 bp, Artificial Sequence
  Synthetic Sequence
ctagtcctga

SEQ ID NO: 4156 - DNA, 10 bp, Artificial Sequence
  Synthetic Sequence
ggtaacaagg

SEQ ID NO: 4157 - DNA, 10 bp, Artificial Sequence
  Synthetic Sequence
cccgacgtta

SEQ ID NO: 4158 - DNA, 10 bp, Artificial Sequence
  Synthetic Sequence
ttcgtggagc

SEQ ID NO: 4159 - DNA, 10 bp, Artificial Sequence
  Synthetic Sequence
ataagatgcc

SEQ ID NO: 4160 - DNA, 10 bp, Artificial Sequence
  Synthetic Sequence
gtggagtggg

SEQ ID NO: 4161 - DNA, 10 bp, Artificial Sequence
  Synthetic Sequence
tgctatgagc

SEQ ID NO: 4162 - DNA, 10 bp, Artificial Sequence
  Synthetic Sequence
tgcaaagcac

SEQ ID NO: 4163 - DNA, 10 bp, Artificial Sequence
  Synthetic Sequence
acctttggcc

SEQ ID NO: 4164 - DNA, 10 bp, Artificial Sequence
  Synthetic Sequence
cccgcaatca

SEQ ID NO: 4165 - DNA, 10 bp, Artificial Sequence
  Synthetic Sequence
atccactgca

SEQ ID NO: 4166 - DNA, 10 bp, Artificial Sequence
  Synthetic Sequence
atcggcgctc

SEQ ID NO: 4167 - DNA, 10 bp, Artificial Sequence
  Synthetic Sequence
cctatcgcgt

SEQ ID NO: 4168 - DNA, 10 bp, Artificial Sequence
  Synthetic Sequence
tgacatcccg

SEQ ID NO: 4169 - DNA, 10 bp, Artificial Sequence
  Synthetic Sequence
gcatagtatc

SEQ ID NO: 4170 - DNA, 10 bp, Artificial Sequence
  Synthetic Sequence
tgttgtagtt

SEQ ID NO: 4171 - DNA, 10 bp, Artificial Sequence
  Synthetic Sequence
tagtaacctc

SEQ ID NO: 4172 - DNA, 10 bp, Artificial Sequence
  Synthetic Sequence
aggtcgtcta

SEQ ID NO: 4173 - DNA, 10 bp, Artificial Sequence
  Synthetic Sequence
attagacacc

SEQ ID NO: 4174 - DNA, 10 bp, Artificial Sequence
  Synthetic Sequence
ttcccactat

SEQ ID NO: 4175 - DNA, 10 bp, Artificial Sequence
  Synthetic Sequence
tccaccaccg

SEQ ID NO: 4176 - DNA, 10 bp, Artificial Sequence
  Synthetic Sequence
attacgctca

SEQ ID NO: 4177 - DNA, 10 bp, Artificial Sequence
  Synthetic Sequence
tatggtgtta

SEQ ID NO: 4178 - DNA, 10 bp, Artificial Sequence
  Synthetic Sequence
tatttgagat

SEQ ID NO: 4179 - DNA, 10 bp, Artificial Sequence
  Synthetic Sequence
atcccgcgta

SEQ ID NO: 4180 - DNA, 10 bp, Artificial Sequence
  Synthetic Sequence
tcggccacct

SEQ ID NO: 4181 - DNA, 10 bp, Artificial Sequence
  Synthetic Sequence
gtcttcccat

SEQ ID NO: 4182 - DNA, 10 bp, Artificial Sequence
  Synthetic Sequence
agtacccgcc

SEQ ID NO: 4183 - DNA, 10 bp, Artificial Sequence
  Synthetic Sequence
tacctcaaca

SEQ ID NO: 4184 - DNA, 10 bp, Artificial Sequence
  Synthetic Sequence
agtcccagtg

SEQ ID NO: 4185 - DNA, 10 bp, Artificial Sequence
  Synthetic Sequence
acattggagt

SEQ ID NO: 4186 - DNA, 10 bp, Artificial Sequence
  Synthetic Sequence
ctgacagttg

SEQ ID NO: 4187 - DNA, 10 bp, Artificial Sequence
  Synthetic Sequence
atgagcatcg

SEQ ID NO: 4188 - DNA, 10 bp, Artificial Sequence
  Synthetic Sequence
ctcccaagga

SEQ ID NO: 4189 - DNA, 10 bp, Artificial Sequence
  Synthetic Sequence
aatcaagcca

SEQ ID NO: 4190 - DNA, 10 bp, Artificial Sequence
  Synthetic Sequence
gtcgagggca

SEQ ID NO: 4191 - DNA, 10 bp, Artificial Sequence
  Synthetic Sequence
cgtcgttcag

SEQ ID NO: 4192 - DNA, 10 bp, Artificial Sequence
  Synthetic Sequence
gagtcccacc

SEQ ID NO: 4193 - DNA, 10 bp, Artificial Sequence
  Synthetic Sequence
tttaggctgc

SEQ ID NO: 4194 - DNA, 10 bp, Artificial Sequence
  Synthetic Sequence
cgggctagtc

SEQ ID NO: 4195 - DNA, 10 bp, Artificial Sequence
  Synthetic Sequence
agtctcactt

SEQ ID NO: 4196 - DNA, 10 bp, Artificial Sequence
  Synthetic Sequence
ttcgctacgg

SEQ ID NO: 4197 - DNA, 10 bp, Artificial Sequence
  Synthetic Sequence
gcaggacctg

SEQ ID NO: 4198 - DNA, 10 bp, Artificial Sequence
  Synthetic Sequence
ttcattggat

SEQ ID NO: 4199 - DNA, 10 bp, Artificial Sequence
  Synthetic Sequence
taatttatcg

SEQ ID NO: 4200 - DNA, 10 bp, Artificial Sequence
  Synthetic Sequence
agtcaaagcc

SEQ ID NO: 4201 - DNA, 10 bp, Artificial Sequence
  Synthetic Sequence
atataagcgt

SEQ ID NO: 4202 - DNA, 10 bp, Artificial Sequence
  Synthetic Sequence
gcttgtataa

SEQ ID NO: 4203 - DNA, 10 bp, Artificial Sequence
  Synthetic Sequence
aaggctaact

SEQ ID NO: 4204 - DNA, 10 bp, Artificial Sequence
  Synthetic Sequence
acatgtacct

SEQ ID NO: 4205 - DNA, 10 bp, Artificial Sequence
  Synthetic Sequence
agcttgaaac

SEQ ID NO: 4206 - DNA, 10 bp, Artificial Sequence
  Synthetic Sequence
ccttggacta

SEQ ID NO: 4207 - DNA, 10 bp, Artificial Sequence
  Synthetic Sequence
accttcgtgt

SEQ ID NO: 4208 - DNA, 10 bp, Artificial Sequence
  Synthetic Sequence
acttccgggt

SEQ ID NO: 4209 - DNA, 10 bp, Artificial Sequence
  Synthetic Sequence
tgtagtgtct

SEQ ID NO: 4210 - DNA, 10 bp, Artificial Sequence
  Synthetic Sequence
cgttccctgt

SEQ ID NO: 4211 - DNA, 10 bp, Artificial Sequence
  Synthetic Sequence
gcccaaaccc

SEQ ID NO: 4212 - DNA, 10 bp, Artificial Sequence
  Synthetic Sequence
tgggatgtaa

SEQ ID NO: 4213 - DNA, 10 bp, Artificial Sequence
  Synthetic Sequence
tcgtctccaa

SEQ ID NO: 4214 - DNA, 10 bp, Artificial Sequence
  Synthetic Sequence
tcacaggcat

SEQ ID NO: 4215 - DNA, 10 bp, Artificial Sequence
  Synthetic Sequence
ctattcgagg

SEQ ID NO: 4216 - DNA, 10 bp, Artificial Sequence
  Synthetic Sequence
gctctcacgg

SEQ ID NO: 4217 - DNA, 10 bp, Artificial Sequence
  Synthetic Sequence
acgtttctct

SEQ ID NO: 4218 - DNA, 10 bp, Artificial Sequence
  Synthetic Sequence
cgctgatgag

SEQ ID NO: 4219 - DNA, 10 bp, Artificial Sequence
  Synthetic Sequence
ccttaggtgg

SEQ ID NO: 4220 - DNA, 10 bp, Artificial Sequence
  Synthetic Sequence
ggatcctatt

SEQ ID NO: 4221 - DNA, 10 bp, Artificial Sequence
  Synthetic Sequence
cacagtttgt

SEQ ID NO: 4222 - DNA, 10 bp, Artificial Sequence
  Synthetic Sequence
atccgtgggc

SEQ ID NO: 4223 - DNA, 10 bp, Artificial Sequence
  Synthetic Sequence
tctagcttaa

SEQ ID NO: 4224 - DNA, 10 bp, Artificial Sequence
  Synthetic Sequence
gccgcttgat

SEQ ID NO: 4225 - DNA, 10 bp, Artificial Sequence
  Synthetic Sequence
cgaatttgct

SEQ ID NO: 4226 - DNA, 10 bp, Artificial Sequence
  Synthetic Sequence
actcagccta

SEQ ID NO: 4227 - DNA, 10 bp, Artificial Sequence
  Synthetic Sequence
tggttggcgc

SEQ ID NO: 4228 - DNA, 10 bp, Artificial Sequence
  Synthetic Sequence
gaagtgggat

SEQ ID NO: 4229 - DNA, 10 bp, Artificial Sequence
  Synthetic Sequence
ggaatcttcc

SEQ ID NO: 4230 - DNA, 10 bp, Artificial Sequence
  Synthetic Sequence
tcctgatagc

SEQ ID NO: 4231 - DNA, 10 bp, Artificial Sequence
  Synthetic Sequence
atccgtatgg

SEQ ID NO: 4232 - DNA, 10 bp, Artificial Sequence
  Synthetic Sequence
ggcagctcga

SEQ ID NO: 4233 - DNA, 10 bp, Artificial Sequence
  Synthetic Sequence
caagccttca

SEQ ID NO: 4234 - DNA, 10 bp, Artificial Sequence
  Synthetic Sequence
cataacggct

SEQ ID NO: 4235 - DNA, 10 bp, Artificial Sequence
  Synthetic Sequence
agacatgacg

SEQ ID NO: 4236 - DNA, 10 bp, Artificial Sequence
  Synthetic Sequence
taccctactc

SEQ ID NO: 4237 - DNA, 10 bp, Artificial Sequence
  Synthetic Sequence
tcggagagat

SEQ ID NO: 4238 - DNA, 10 bp, Artificial Sequence
  Synthetic Sequence
gttaggaagc

SEQ ID NO: 4239 - DNA, 10 bp, Artificial Sequence
  Synthetic Sequence
tcttctaatc

SEQ ID NO: 4240 - DNA, 10 bp, Artificial Sequence
  Synthetic Sequence
cgatccttag

SEQ ID NO: 4241 - DNA, 10 bp, Artificial Sequence
  Synthetic Sequence
tgaagggtcc

SEQ ID NO: 4242 - DNA, 10 bp, Artificial Sequence
  Synthetic Sequence
gcaggcgaac

SEQ ID NO: 4243 - DNA, 10 bp, Artificial Sequence
  Synthetic Sequence
agagaaacgg

SEQ ID NO: 4244 - DNA, 10 bp, Artificial Sequence
  Synthetic Sequence
gtatctaggc

SEQ ID NO: 4245 - DNA, 10 bp, Artificial Sequence
  Synthetic Sequence
ggtaccggtg

SEQ ID NO: 4246 - DNA, 10 bp, Artificial Sequence
  Synthetic Sequence
tccgcatcat

SEQ ID NO: 4247 - DNA, 10 bp, Artificial Sequence
  Synthetic Sequence
ccagttgacc

SEQ ID NO: 4248 - DNA, 10 bp, Artificial Sequence
  Synthetic Sequence
tgccgttaat

SEQ ID NO: 4249 - DNA, 10 bp, Artificial Sequence
  Synthetic Sequence
ctccctccat

SEQ ID NO: 4250 - DNA, 10 bp, Artificial Sequence
  Synthetic Sequence
gaaattggca

SEQ ID NO: 4251 - DNA, 10 bp, Artificial Sequence
  Synthetic Sequence
gtcttcgctc

SEQ ID NO: 4252 - DNA, 10 bp, Artificial Sequence
  Synthetic Sequence
gcgattcttt

SEQ ID NO: 4253 - DNA, 10 bp, Artificial Sequence
  Synthetic Sequence
aacctagctt

SEQ ID NO: 4254 - DNA, 10 bp, Artificial Sequence
  Synthetic Sequence
actgaaacac

SEQ ID NO: 4255 - DNA, 10 bp, Artificial Sequence
  Synthetic Sequence
caacacccga

SEQ ID NO: 4256 - DNA, 10 bp, Artificial Sequence
  Synthetic Sequence
ttgactcatc

SEQ ID NO: 4257 - DNA, 10 bp, Artificial Sequence
  Synthetic Sequence
agatgtagtc

SEQ ID NO: 4258 - DNA, 10 bp, Artificial Sequence
  Synthetic Sequence
acctgctcgc

SEQ ID NO: 4259 - DNA, 10 bp, Artificial Sequence
  Synthetic Sequence
agaagtggat

SEQ ID NO: 4260 - DNA, 10 bp, Artificial Sequence
  Synthetic Sequence
cagacgtatt

SEQ ID NO: 4261 - DNA, 10 bp, Artificial Sequence
  Synthetic Sequence
gccttaaata

SEQ ID NO: 4262 - DNA, 10 bp, Artificial Sequence
  Synthetic Sequence
cgacgcgcaa

SEQ ID NO: 4263 - DNA, 10 bp, Artificial Sequence
  Synthetic Sequence
caagaggcga

SEQ ID NO: 4264 - DNA, 10 bp, Artificial Sequence
  Synthetic Sequence
gcagcacgta

SEQ ID NO: 4265 - DNA, 10 bp, Artificial Sequence
  Synthetic Sequence
ctcggtttca

SEQ ID NO: 4266 - DNA, 10 bp, Artificial Sequence
  Synthetic Sequence
gagaagaacc

SEQ ID NO: 4267 - DNA, 10 bp, Artificial Sequence
  Synthetic Sequence
cagcgtaaga

SEQ ID NO: 4268 - DNA, 10 bp, Artificial Sequence
  Synthetic Sequence
tggaacagcg

SEQ ID NO: 4269 - DNA, 10 bp, Artificial Sequence
  Synthetic Sequence
tccggtcagg

SEQ ID NO: 4270 - DNA, 10 bp, Artificial Sequence
  Synthetic Sequence
gttgatacgt

SEQ ID NO: 4271 - DNA, 10 bp, Artificial Sequence
  Synthetic Sequence
gatctagaaa

SEQ ID NO: 4272 - DNA, 10 bp, Artificial Sequence
  Synthetic Sequence
agaactagac

SEQ ID NO: 4273 - DNA, 10 bp, Artificial Sequence
  Synthetic Sequence
tgacagagct

SEQ ID NO: 4274 - DNA, 10 bp, Artificial Sequence
  Synthetic Sequence
acggcacgga

SEQ ID NO: 4275 - DNA, 10 bp, Artificial Sequence
  Synthetic Sequence
agaccgatac

SEQ ID NO: 4276 - DNA, 10 bp, Artificial Sequence
  Synthetic Sequence
tgttacggtg

SEQ ID NO: 4277 - DNA, 10 bp, Artificial Sequence
  Synthetic Sequence
gtcgcatgta

SEQ ID NO: 4278 - DNA, 10 bp, Artificial Sequence
  Synthetic Sequence
gagttgcgca

SEQ ID NO: 4279 - DNA, 10 bp, Artificial Sequence
  Synthetic Sequence
cttaaagcgt

SEQ ID NO: 4280 - DNA, 10 bp, Artificial Sequence
  Synthetic Sequence
tgcttcacca

SEQ ID NO: 4281 - DNA, 10 bp, Artificial Sequence
  Synthetic Sequence
acccattctg

SEQ ID NO: 4282 - DNA, 10 bp, Artificial Sequence
  Synthetic Sequence
actaatccaa

SEQ ID NO: 4283 - DNA, 10 bp, Artificial Sequence
  Synthetic Sequence
atttaggtca

SEQ ID NO: 4284 - DNA, 10 bp, Artificial Sequence
  Synthetic Sequence
aacattaacc

SEQ ID NO: 4285 - DNA, 10 bp, Artificial Sequence
  Synthetic Sequence
gcggtaagag

SEQ ID NO: 4286 - DNA, 10 bp, Artificial Sequence
  Synthetic Sequence
tccatgactg

SEQ ID NO: 4287 - DNA, 10 bp, Artificial Sequence
  Synthetic Sequence
acgtcaattt

SEQ ID NO: 4288 - DNA, 10 bp, Artificial Sequence
  Synthetic Sequence
gcgccatgac

SEQ ID NO: 4289 - DNA, 10 bp, Artificial Sequence
  Synthetic Sequence
gcacgcgatg

SEQ ID NO: 4290 - DNA, 10 bp, Artificial Sequence
  Synthetic Sequence
tccgggtcca

SEQ ID NO: 4291 - DNA, 10 bp, Artificial Sequence
  Synthetic Sequence
gcgacaacgc

SEQ ID NO: 4292 - DNA, 10 bp, Artificial Sequence
  Synthetic Sequence
atcgacttcc

SEQ ID NO: 4293 - DNA, 10 bp, Artificial Sequence
  Synthetic Sequence
ggtccaagca

SEQ ID NO: 4294 - DNA, 10 bp, Artificial Sequence
  Synthetic Sequence
cgtcgtccct

SEQ ID NO: 4295 - DNA, 10 bp, Artificial Sequence
  Synthetic Sequence
ccgagaggtg

SEQ ID NO: 4296 - DNA, 10 bp, Artificial Sequence
  Synthetic Sequence
aaagtcaaca

SEQ ID NO: 4297 - DNA, 10 bp, Artificial Sequence
  Synthetic Sequence
tggatcgttg

SEQ ID NO: 4298 - DNA, 10 bp, Artificial Sequence
  Synthetic Sequence
aatctcttgg

SEQ ID NO: 4299 - DNA, 10 bp, Artificial Sequence
  Synthetic Sequence
tacgacccac

SEQ ID NO: 4300 - DNA, 10 bp, Artificial Sequence
  Synthetic Sequence
gccatgacac

SEQ ID NO: 4301 - DNA, 10 bp, Artificial Sequence
  Synthetic Sequence
cgcggtgttg

SEQ ID NO: 4302 - DNA, 10 bp, Artificial Sequence
  Synthetic Sequence
cggtgctcga

SEQ ID NO: 4303 - DNA, 10 bp, Artificial Sequence
  Synthetic Sequence
cctgtaataa

SEQ ID NO: 4304 - DNA, 10 bp, Artificial Sequence
  Synthetic Sequence
tctactttag

SEQ ID NO: 4305 - DNA, 10 bp, Artificial Sequence
  Synthetic Sequence
ctgtctacag

SEQ ID NO: 4306 - DNA, 10 bp, Artificial Sequence
  Synthetic Sequence
gtgcagctat

SEQ ID NO: 4307 - DNA, 10 bp, Artificial Sequence
  Synthetic Sequence
gccgattaca

SEQ ID NO: 4308 - DNA, 10 bp, Artificial Sequence
  Synthetic Sequence
agttcagaat

SEQ ID NO: 4309 - DNA, 10 bp, Artificial Sequence
  Synthetic Sequence
ccattgagag

SEQ ID NO: 4310 - DNA, 10 bp, Artificial Sequence
  Synthetic Sequence
catgcctggc

SEQ ID NO: 4311 - DNA, 10 bp, Artificial Sequence
  Synthetic Sequence
tcaccttata

SEQ ID NO: 4312 - DNA, 10 bp, Artificial Sequence
  Synthetic Sequence
ggctccaact

SEQ ID NO: 4313 - DNA, 10 bp, Artificial Sequence
  Synthetic Sequence
atctccgata

SEQ ID NO: 4314 - DNA, 10 bp, Artificial Sequence
  Synthetic Sequence
aatagacctt

SEQ ID NO: 4315 - DNA, 10 bp, Artificial Sequence
  Synthetic Sequence
acctgcaggg

SEQ ID NO: 4316 - DNA, 10 bp, Artificial Sequence
  Synthetic Sequence
taggcaggca

SEQ ID NO: 4317 - DNA, 10 bp, Artificial Sequence
  Synthetic Sequence
gtccctgcgt

SEQ ID NO: 4318 - DNA, 10 bp, Artificial Sequence
  Synthetic Sequence
gtatcattaa

SEQ ID NO: 4319 - DNA, 10 bp, Artificial Sequence
  Synthetic Sequence
taccaagtag

SEQ ID NO: 4320 - DNA, 10 bp, Artificial Sequence
  Synthetic Sequence
gctattgtat

SEQ ID NO: 4321 - DNA, 10 bp, Artificial Sequence
  Synthetic Sequence
tcttgcggaa

SEQ ID NO: 4322 - DNA, 10 bp, Artificial Sequence
  Synthetic Sequence
catacttagg

SEQ ID NO: 4323 - DNA, 10 bp, Artificial Sequence
  Synthetic Sequence
catctccatc

SEQ ID NO: 4324 - DNA, 10 bp, Artificial Sequence
  Synthetic Sequence
accgttgcac

SEQ ID NO: 4325 - DNA, 10 bp, Artificial Sequence
  Synthetic Sequence
gtcacataac

SEQ ID NO: 4326 - DNA, 10 bp, Artificial Sequence
  Synthetic Sequence
tatgctatct

SEQ ID NO: 4327 - DNA, 10 bp, Artificial Sequence
  Synthetic Sequence
aaggtagtca

SEQ ID NO: 4328 - DNA, 10 bp, Artificial Sequence
  Synthetic Sequence
ccacaaacgt

SEQ ID NO: 4329 - DNA, 10 bp, Artificial Sequence
  Synthetic Sequence
cctggagtcg

SEQ ID NO: 4330 - DNA, 10 bp, Artificial Sequence
  Synthetic Sequence
aactagtact

SEQ ID NO: 4331 - DNA, 10 bp, Artificial Sequence
  Synthetic Sequence
cgacgagtac

SEQ ID NO: 4332 - DNA, 10 bp, Artificial Sequence
  Synthetic Sequence
tccaaatcgt

SEQ ID NO: 4333 - DNA, 10 bp, Artificial Sequence
  Synthetic Sequence
gtacccggat

SEQ ID NO: 4334 - DNA, 10 bp, Artificial Sequence
  Synthetic Sequence
ctcagcgcca

SEQ ID NO: 4335 - DNA, 10 bp, Artificial Sequence
  Synthetic Sequence
ttgtctgaag

SEQ ID NO: 4336 - DNA, 10 bp, Artificial Sequence
  Synthetic Sequence
ctcgtcggtt

SEQ ID NO: 4337 - DNA, 10 bp, Artificial Sequence
  Synthetic Sequence
gcatgggtga

SEQ ID NO: 4338 - DNA, 10 bp, Artificial Sequence
  Synthetic Sequence
tacatcaccc

SEQ ID NO: 4339 - DNA, 10 bp, Artificial Sequence
  Synthetic Sequence
agacgtacgg

SEQ ID NO: 4340 - DNA, 10 bp, Artificial Sequence
  Synthetic Sequence
tggcgtcaga

SEQ ID NO: 4341 - DNA, 10 bp, Artificial Sequence
  Synthetic Sequence
tgagccaagg

SEQ ID NO: 4342 - DNA, 10 bp, Artificial Sequence
  Synthetic Sequence
ccgctccatt

SEQ ID NO: 4343 - DNA, 10 bp, Artificial Sequence
  Synthetic Sequence
tcgaagctac

SEQ ID NO: 4344 - DNA, 10 bp, Artificial Sequence
  Synthetic Sequence
caacagtaag

SEQ ID NO: 4345 - DNA, 10 bp, Artificial Sequence
  Synthetic Sequence
ctagataatg

SEQ ID NO: 4346 - DNA, 10 bp, Artificial Sequence
  Synthetic Sequence
tgagtaatat

SEQ ID NO: 4347 - DNA, 10 bp, Artificial Sequence
  Synthetic Sequence
ataccggata

SEQ ID NO: 4348 - DNA, 10 bp, Artificial Sequence
  Synthetic Sequence
gagtccgtgt

SEQ ID NO: 4349 - DNA, 10 bp, Artificial Sequence
  Synthetic Sequence
cggctttgca

SEQ ID NO: 4350 - DNA, 10 bp, Artificial Sequence
  Synthetic Sequence
gtagtcaccg

SEQ ID NO: 4351 - DNA, 10 bp, Artificial Sequence
  Synthetic Sequence
ctaattcgtc

SEQ ID NO: 4352 - DNA, 10 bp, Artificial Sequence
  Synthetic Sequence
agtcggcatt

SEQ ID NO: 4353 - DNA, 10 bp, Artificial Sequence
  Synthetic Sequence
taataaagag

SEQ ID NO: 4354 - DNA, 10 bp, Artificial Sequence
  Synthetic Sequence
gttcccaggg

SEQ ID NO: 4355 - DNA, 10 bp, Artificial Sequence
  Synthetic Sequence
ccatatctcc

SEQ ID NO: 4356 - DNA, 10 bp, Artificial Sequence
  Synthetic Sequence
aaatcaaatt

SEQ ID NO: 4357 - DNA, 10 bp, Artificial Sequence
  Synthetic Sequence
cttccaactc

SEQ ID NO: 4358 - DNA, 10 bp, Artificial Sequence
  Synthetic Sequence
aagaatttac

SEQ ID NO: 4359 - DNA, 10 bp, Artificial Sequence
  Synthetic Sequence
ttccatatgt

SEQ ID NO: 4360 - DNA, 10 bp, Artificial Sequence
  Synthetic Sequence
attgcggagg

SEQ ID NO: 4361 - DNA, 10 bp, Artificial Sequence
  Synthetic Sequence
cctactttgt

SEQ ID NO: 4362 - DNA, 10 bp, Artificial Sequence
  Synthetic Sequence
gacaactagt

SEQ ID NO: 4363 - DNA, 10 bp, Artificial Sequence
  Synthetic Sequence
tcgcggatca

SEQ ID NO: 4364 - DNA, 10 bp, Artificial Sequence
  Synthetic Sequence
tcagggttga

SEQ ID NO: 4365 - DNA, 10 bp, Artificial Sequence
  Synthetic Sequence
aggtagaggc

SEQ ID NO: 4366 - DNA, 10 bp, Artificial Sequence
  Synthetic Sequence
ctcgatagcc

SEQ ID NO: 4367 - DNA, 10 bp, Artificial Sequence
  Synthetic Sequence
tatcctaaga

SEQ ID NO: 4368 - DNA, 10 bp, Artificial Sequence
  Synthetic Sequence
gatccactat

SEQ ID NO: 4369 - DNA, 10 bp, Artificial Sequence
  Synthetic Sequence
tcctcgcgtc

SEQ ID NO: 4370 - DNA, 10 bp, Artificial Sequence
  Synthetic Sequence
ctcggtgagt

SEQ ID NO: 4371 - DNA, 10 bp, Artificial Sequence
  Synthetic Sequence
cgcaggttgc

SEQ ID NO: 4372 - DNA, 10 bp, Artificial Sequence
  Synthetic Sequence
cagcgacatg

SEQ ID NO: 4373 - DNA, 10 bp, Artificial Sequence
  Synthetic Sequence
gactcactca

SEQ ID NO: 4374 - DNA, 10 bp, Artificial Sequence
  Synthetic Sequence
tttgctaagc

SEQ ID NO: 4375 - DNA, 10 bp, Artificial Sequence
  Synthetic Sequence
taggttctga

SEQ ID NO: 4376 - DNA, 10 bp, Artificial Sequence
  Synthetic Sequence
ggtagttcct

SEQ ID NO: 4377 - DNA, 10 bp, Artificial Sequence
  Synthetic Sequence
tagcatcgga

SEQ ID NO: 4378 - DNA, 10 bp, Artificial Sequence
  Synthetic Sequence
tatttgtgcg

SEQ ID NO: 4379 - DNA, 10 bp, Artificial Sequence
  Synthetic Sequence
tgtaccacca

SEQ ID NO: 4380 - DNA, 10 bp, Artificial Sequence
  Synthetic Sequence
tagtgaccgg

SEQ ID NO: 4381 - DNA, 10 bp, Artificial Sequence
  Synthetic Sequence
aagcgaatac

SEQ ID NO: 4382 - DNA, 10 bp, Artificial Sequence
  Synthetic Sequence
aggataggcc

SEQ ID NO: 4383 - DNA, 10 bp, Artificial Sequence
  Synthetic Sequence
gtctctacac

SEQ ID NO: 4384 - DNA, 10 bp, Artificial Sequence
  Synthetic Sequence
agcataccca

SEQ ID NO: 4385 - DNA, 10 bp, Artificial Sequence
  Synthetic Sequence
caaacgagcc

SEQ ID NO: 4386 - DNA, 10 bp, Artificial Sequence
  Synthetic Sequence
taagaggact

SEQ ID NO: 4387 - DNA, 10 bp, Artificial Sequence
  Synthetic Sequence
tgcgacaatt

SEQ ID NO: 4388 - DNA, 10 bp, Artificial Sequence
  Synthetic Sequence
gatagtcgtg

SEQ ID NO: 4389 - DNA, 10 bp, Artificial Sequence
  Synthetic Sequence
ctctggtcag

SEQ ID NO: 4390 - DNA, 10 bp, Artificial Sequence
  Synthetic Sequence
cgatagcgct

SEQ ID NO: 4391 - DNA, 10 bp, Artificial Sequence
  Synthetic Sequence
gctccaatgc

SEQ ID NO: 4392 - DNA, 10 bp, Artificial Sequence
  Synthetic Sequence
ctgctcgtcc

SEQ ID NO: 4393 - DNA, 10 bp, Artificial Sequence
  Synthetic Sequence
acagggcagg

SEQ ID NO: 4394 - DNA, 10 bp, Artificial Sequence
  Synthetic Sequence
gttccggtct

SEQ ID NO: 4395 - DNA, 10 bp, Artificial Sequence
  Synthetic Sequence
ttcgagtcac

SEQ ID NO: 4396 - DNA, 10 bp, Artificial Sequence
  Synthetic Sequence
cgaactatgt

SEQ ID NO: 4397 - DNA, 10 bp, Artificial Sequence
  Synthetic Sequence
tcctgttatt

SEQ ID NO: 4398 - DNA, 10 bp, Artificial Sequence
  Synthetic Sequence
ggtttactgt

SEQ ID NO: 4399 - DNA, 10 bp, Artificial Sequence
  Synthetic Sequence
gactaagaca

SEQ ID NO: 4400 - DNA, 10 bp, Artificial Sequence
  Synthetic Sequence
gaacgcgtgg

SEQ ID NO: 4401 - DNA, 10 bp, Artificial Sequence
  Synthetic Sequence
cacccagcct

SEQ ID NO: 4402 - DNA, 10 bp, Artificial Sequence
  Synthetic Sequence
agcaaggtat

SEQ ID NO: 4403 - DNA, 10 bp, Artificial Sequence
  Synthetic Sequence
tcatttgtgt

SEQ ID NO: 4404 - DNA, 10 bp, Artificial Sequence
  Synthetic Sequence
ctcaagcttc

SEQ ID NO: 4405 - DNA, 10 bp, Artificial Sequence
  Synthetic Sequence
gtatgaacag

SEQ ID NO: 4406 - DNA, 10 bp, Artificial Sequence
  Synthetic Sequence
acgctgcttg

SEQ ID NO: 4407 - DNA, 10 bp, Artificial Sequence
  Synthetic Sequence
ctatggcaca

SEQ ID NO: 4408 - DNA, 10 bp, Artificial Sequence
  Synthetic Sequence
cgacatactc

SEQ ID NO: 4409 - DNA, 10 bp, Artificial Sequence
  Synthetic Sequence
tgtcggacgg

SEQ ID NO: 4410 - DNA, 10 bp, Artificial Sequence
  Synthetic Sequence
ggtccagatg

SEQ ID NO: 4411 - DNA, 10 bp, Artificial Sequence
  Synthetic Sequence
accctcttgc

SEQ ID NO: 4412 - DNA, 10 bp, Artificial Sequence
  Synthetic Sequence
tggcactgag

SEQ ID NO: 4413 - DNA, 10 bp, Artificial Sequence
  Synthetic Sequence
ggttgcatgg

SEQ ID NO: 4414 - DNA, 10 bp, Artificial Sequence
  Synthetic Sequence
ttatcatgcc

SEQ ID NO: 4415 - DNA, 10 bp, Artificial Sequence
  Synthetic Sequence
cccacttcgg

SEQ ID NO: 4416 - DNA, 10 bp, Artificial Sequence
  Synthetic Sequence
gaaagcgcca

SEQ ID NO: 4417 - DNA, 10 bp, Artificial Sequence
  Synthetic Sequence
tctatatcca

SEQ ID NO: 4418 - DNA, 10 bp, Artificial Sequence
  Synthetic Sequence
gatttacgat

SEQ ID NO: 4419 - DNA, 10 bp, Artificial Sequence
  Synthetic Sequence
ggccctgact

SEQ ID NO: 4420 - DNA, 10 bp, Artificial Sequence
  Synthetic Sequence
ggaaccaaga

SEQ ID NO: 4421 - DNA, 10 bp, Artificial Sequence
  Synthetic Sequence
atttagacat

SEQ ID NO: 4422 - DNA, 10 bp, Artificial Sequence
  Synthetic Sequence
tggatcgcgt

SEQ ID NO: 4423 - DNA, 10 bp, Artificial Sequence
  Synthetic Sequence
aacgaccggg

SEQ ID NO: 4424 - DNA, 10 bp, Artificial Sequence
  Synthetic Sequence
agtgaaatct

SEQ ID NO: 4425 - DNA, 10 bp, Artificial Sequence
  Synthetic Sequence
tgtgtctcga

SEQ ID NO: 4426 - DNA, 10 bp, Artificial Sequence
  Synthetic Sequence
ttaagatggg

SEQ ID NO: 4427 - DNA, 10 bp, Artificial Sequence
  Synthetic Sequence
ctcaagatga

SEQ ID NO: 4428 - DNA, 10 bp, Artificial Sequence
  Synthetic Sequence
atctcgttag

SEQ ID NO: 4429 - DNA, 10 bp, Artificial Sequence
  Synthetic Sequence
gaactggcgc

SEQ ID NO: 4430 - DNA, 10 bp, Artificial Sequence
  Synthetic Sequence
agaagtttcc

SEQ ID NO: 4431 - DNA, 10 bp, Artificial Sequence
  Synthetic Sequence
tatactaacc

SEQ ID NO: 4432 - DNA, 10 bp, Artificial Sequence
  Synthetic Sequence
tattccgaac

SEQ ID NO: 4433 - DNA, 10 bp, Artificial Sequence
  Synthetic Sequence
gcgggcttgt

SEQ ID NO: 4434 - DNA, 10 bp, Artificial Sequence
  Synthetic Sequence
cctagcctgc

SEQ ID NO: 4435 - DNA, 10 bp, Artificial Sequence
  Synthetic Sequence
ccgtctgggt

SEQ ID NO: 4436 - DNA, 10 bp, Artificial Sequence
  Synthetic Sequence
tagaaccctt

SEQ ID NO: 4437 - DNA, 10 bp, Artificial Sequence
  Synthetic Sequence
gggccaattc

SEQ ID NO: 4438 - DNA, 10 bp, Artificial Sequence
  Synthetic Sequence
gacgaagcat

SEQ ID NO: 4439 - DNA, 10 bp, Artificial Sequence
  Synthetic Sequence
gcattagtag

SEQ ID NO: 4440 - DNA, 10 bp, Artificial Sequence
  Synthetic Sequence
actgggtcag

SEQ ID NO: 4441 - DNA, 10 bp, Artificial Sequence
  Synthetic Sequence
tctctatctg

SEQ ID NO: 4442 - DNA, 10 bp, Artificial Sequence
  Synthetic Sequence
gccttgtgtg

SEQ ID NO: 4443 - DNA, 10 bp, Artificial Sequence
  Synthetic Sequence
ctgtgagctc

SEQ ID NO: 4444 - DNA, 10 bp, Artificial Sequence
  Synthetic Sequence
ataatcatgt

SEQ ID NO: 4445 - DNA, 10 bp, Artificial Sequence
  Synthetic Sequence
cgcacttggc

SEQ ID NO: 4446 - DNA, 10 bp, Artificial Sequence
  Synthetic Sequence
ccactggcga

SEQ ID NO: 4447 - DNA, 10 bp, Artificial Sequence
  Synthetic Sequence
caacacgagc

SEQ ID NO: 4448 - DNA, 10 bp, Artificial Sequence
  Synthetic Sequence
ctgcaacaac

SEQ ID NO: 4449 - DNA, 10 bp, Artificial Sequence
  Synthetic Sequence
tacacgtaca

SEQ ID NO: 4450 - DNA, 10 bp, Artificial Sequence
  Synthetic Sequence
aaagtaagta

SEQ ID NO: 4451 - DNA, 10 bp, Artificial Sequence
  Synthetic Sequence
atcgcgttgt

SEQ ID NO: 4452 - DNA, 10 bp, Artificial Sequence
  Synthetic Sequence
tcaaactagc

SEQ ID NO: 4453 - DNA, 10 bp, Artificial Sequence
  Synthetic Sequence
cctttatcag

SEQ ID NO: 4454 - DNA, 10 bp, Artificial Sequence
  Synthetic Sequence
agagattgtc

SEQ ID NO: 4455 - DNA, 10 bp, Artificial Sequence
  Synthetic Sequence
ataggtcaca

SEQ ID NO: 4456 - DNA, 10 bp, Artificial Sequence
  Synthetic Sequence
tgtgtagtcc

SEQ ID NO: 4457 - DNA, 10 bp, Artificial Sequence
  Synthetic Sequence
atgctcatat

SEQ ID NO: 4458 - DNA, 10 bp, Artificial Sequence
  Synthetic Sequence
cacactttaa

SEQ ID NO: 4459 - DNA, 10 bp, Artificial Sequence
  Synthetic Sequence
ctcccatgac

SEQ ID NO: 4460 - DNA, 10 bp, Artificial Sequence
  Synthetic Sequence
tggagctact

SEQ ID NO: 4461 - DNA, 10 bp, Artificial Sequence
  Synthetic Sequence
tagaggactg

SEQ ID NO: 4462 - DNA, 10 bp, Artificial Sequence
  Synthetic Sequence
acctaaagtt

SEQ ID NO: 4463 - DNA, 10 bp, Artificial Sequence
  Synthetic Sequence
ggtcttgccc

SEQ ID NO: 4464 - DNA, 10 bp, Artificial Sequence
  Synthetic Sequence
tttgggttct

SEQ ID NO: 4465 - DNA, 10 bp, Artificial Sequence
  Synthetic Sequence
taccgtatct

SEQ ID NO: 4466 - DNA, 10 bp, Artificial Sequence
  Synthetic Sequence
cggaacgctc

SEQ ID NO: 4467 - DNA, 10 bp, Artificial Sequence
  Synthetic Sequence
tacaaacgca

SEQ ID NO: 4468 - DNA, 10 bp, Artificial Sequence
  Synthetic Sequence
accggaaggc

SEQ ID NO: 4469 - DNA, 10 bp, Artificial Sequence
  Synthetic Sequence
ccgatagtcc

SEQ ID NO: 4470 - DNA, 10 bp, Artificial Sequence
  Synthetic Sequence
tcggttacgc

SEQ ID NO: 4471 - DNA, 10 bp, Artificial Sequence
  Synthetic Sequence
ggatttggtc

SEQ ID NO: 4472 - DNA, 10 bp, Artificial Sequence
  Synthetic Sequence
gagattatcg

SEQ ID NO: 4473 - DNA, 10 bp, Artificial Sequence
  Synthetic Sequence
ttggaacatg

SEQ ID NO: 4474 - DNA, 10 bp, Artificial Sequence
  Synthetic Sequence
acgataataa

SEQ ID NO: 4475 - DNA, 10 bp, Artificial Sequence
  Synthetic Sequence
cgcgaactca

SEQ ID NO: 4476 - DNA, 10 bp, Artificial Sequence
  Synthetic Sequence
ccgaaacaag

SEQ ID NO: 4477 - DNA, 10 bp, Artificial Sequence
  Synthetic Sequence
taaacggccg

SEQ ID NO: 4478 - DNA, 10 bp, Artificial Sequence
  Synthetic Sequence
cgggtgaact

SEQ ID NO: 4479 - DNA, 10 bp, Artificial Sequence
  Synthetic Sequence
acattacatc

SEQ ID NO: 4480 - DNA, 10 bp, Artificial Sequence
  Synthetic Sequence
gtgctttgga

SEQ ID NO: 4481 - DNA, 10 bp, Artificial Sequence
  Synthetic Sequence
gcgtggatcg

SEQ ID NO: 4482 - DNA, 10 bp, Artificial Sequence
  Synthetic Sequence
gcgtgggaag

SEQ ID NO: 4483 - DNA, 10 bp, Artificial Sequence
  Synthetic Sequence
gtctcgcggt

SEQ ID NO: 4484 - DNA, 10 bp, Artificial Sequence
  Synthetic Sequence
gaggtgaggg

SEQ ID NO: 4485 - DNA, 10 bp, Artificial Sequence
  Synthetic Sequence
gacagtaaca

SEQ ID NO: 4486 - DNA, 10 bp, Artificial Sequence
  Synthetic Sequence
atgtgtcttg

SEQ ID NO: 4487 - DNA, 10 bp, Artificial Sequence
  Synthetic Sequence
agtaaatcag

SEQ ID NO: 4488 - DNA, 10 bp, Artificial Sequence
  Synthetic Sequence
caatagttta

SEQ ID NO: 4489 - DNA, 10 bp, Artificial Sequence
  Synthetic Sequence
cacctaaggc

SEQ ID NO: 4490 - DNA, 10 bp, Artificial Sequence
  Synthetic Sequence
ttcgaagacc

SEQ ID NO: 4491 - DNA, 10 bp, Artificial Sequence
  Synthetic Sequence
ttaatgcaat

SEQ ID NO: 4492 - DNA, 10 bp, Artificial Sequence
  Synthetic Sequence
catctctgct

SEQ ID NO: 4493 - DNA, 10 bp, Artificial Sequence
  Synthetic Sequence
ttaacgttcc

SEQ ID NO: 4494 - DNA, 10 bp, Artificial Sequence
  Synthetic Sequence
tctgacgcat

SEQ ID NO: 4495 - DNA, 10 bp, Artificial Sequence
  Synthetic Sequence
cttgcttact

SEQ ID NO: 4496 - DNA, 10 bp, Artificial Sequence
  Synthetic Sequence
aatcaccgaa

SEQ ID NO: 4497 - DNA, 10 bp, Artificial Sequence
  Synthetic Sequence
ggatagctcg

SEQ ID NO: 4498 - DNA, 10 bp, Artificial Sequence
  Synthetic Sequence
ccgttatgga

SEQ ID NO: 4499 - DNA, 10 bp, Artificial Sequence
  Synthetic Sequence
atagcatgaa

SEQ ID NO: 4500 - DNA, 10 bp, Artificial Sequence
  Synthetic Sequence
taacgaaccg

SEQ ID NO: 4501 - DNA, 10 bp, Artificial Sequence
  Synthetic Sequence
ttaagacccg

SEQ ID NO: 4502 - DNA, 10 bp, Artificial Sequence
  Synthetic Sequence
tagaatccag

SEQ ID NO: 4503 - DNA, 10 bp, Artificial Sequence
  Synthetic Sequence
tgctcaaaca

SEQ ID NO: 4504 - DNA, 10 bp, Artificial Sequence
  Synthetic Sequence
agacagctcc

SEQ ID NO: 4505 - DNA, 10 bp, Artificial Sequence
  Synthetic Sequence
aggcacggga

SEQ ID NO: 4506 - DNA, 10 bp, Artificial Sequence
  Synthetic Sequence
aagtgcatta

SEQ ID NO: 4507 - DNA, 10 bp, Artificial Sequence
  Synthetic Sequence
gtggaggttc

SEQ ID NO: 4508 - DNA, 10 bp, Artificial Sequence
  Synthetic Sequence
gcataattgg

SEQ ID NO: 4509 - DNA, 10 bp, Artificial Sequence
  Synthetic Sequence
actcacaagc

SEQ ID NO: 4510 - DNA, 10 bp, Artificial Sequence
  Synthetic Sequence
tgcctggaca

SEQ ID NO: 4511 - DNA, 10 bp, Artificial Sequence
  Synthetic Sequence
gcaggtgtcg

SEQ ID NO: 4512 - DNA, 10 bp, Artificial Sequence
  Synthetic Sequence
gcgttctcta

SEQ ID NO: 4513 - DNA, 10 bp, Artificial Sequence
  Synthetic Sequence
aataagaagc

SEQ ID NO: 4514 - DNA, 10 bp, Artificial Sequence
  Synthetic Sequence
aaattaccct

SEQ ID NO: 4515 - DNA, 10 bp, Artificial Sequence
  Synthetic Sequence
ctcttctaag

SEQ ID NO: 4516 - DNA, 10 bp, Artificial Sequence
  Synthetic Sequence
aagcagacat

SEQ ID NO: 4517 - DNA, 10 bp, Artificial Sequence
  Synthetic Sequence
cgtttgatgg

SEQ ID NO: 4518 - DNA, 10 bp, Artificial Sequence
  Synthetic Sequence
tttagattat

SEQ ID NO: 4519 - DNA, 10 bp, Artificial Sequence
  Synthetic Sequence
tttccgggtt

SEQ ID NO: 4520 - DNA, 10 bp, Artificial Sequence
  Synthetic Sequence
gctactctgg

SEQ ID NO: 4521 - DNA, 10 bp, Artificial Sequence
  Synthetic Sequence
atttaattag

SEQ ID NO: 4522 - DNA, 10 bp, Artificial Sequence
  Synthetic Sequence
ctatcgatgt

SEQ ID NO: 4523 - DNA, 10 bp, Artificial Sequence
  Synthetic Sequence
catccaacga

SEQ ID NO: 4524 - DNA, 10 bp, Artificial Sequence
  Synthetic Sequence
aaattattta

SEQ ID NO: 4525 - DNA, 10 bp, Artificial Sequence
  Synthetic Sequence
gacttgggcc

SEQ ID NO: 4526 - DNA, 10 bp, Artificial Sequence
  Synthetic Sequence
ttaccgccgg

SEQ ID NO: 4527 - DNA, 10 bp, Artificial Sequence
  Synthetic Sequence
ctatatttaa

SEQ ID NO: 4528 - DNA, 10 bp, Artificial Sequence
  Synthetic Sequence
atggcggtcg

SEQ ID NO: 4529 - DNA, 10 bp, Artificial Sequence
  Synthetic Sequence
aaagctagtt

SEQ ID NO: 4530 - DNA, 10 bp, Artificial Sequence
  Synthetic Sequence
ctaataggag

SEQ ID NO: 4531 - DNA, 10 bp, Artificial Sequence
  Synthetic Sequence
gtgcgcaagg

SEQ ID NO: 4532 - DNA, 10 bp, Artificial Sequence
  Synthetic Sequence
taatccttgc

SEQ ID NO: 4533 - DNA, 10 bp, Artificial Sequence
  Synthetic Sequence
agcccttcaa

SEQ ID NO: 4534 - DNA, 10 bp, Artificial Sequence
  Synthetic Sequence
ggtgagcgta

SEQ ID NO: 4535 - DNA, 10 bp, Artificial Sequence
  Synthetic Sequence
taaatgggct

SEQ ID NO: 4536 - DNA, 10 bp, Artificial Sequence
  Synthetic Sequence
acttcactat

SEQ ID NO: 4537 - DNA, 10 bp, Artificial Sequence
  Synthetic Sequence
tctcgccttg

SEQ ID NO: 4538 - DNA, 10 bp, Artificial Sequence
  Synthetic Sequence
tacgatgaat

SEQ ID NO: 4539 - DNA, 10 bp, Artificial Sequence
  Synthetic Sequence
gaccctaagt

SEQ ID NO: 4540 - DNA, 10 bp, Artificial Sequence
  Synthetic Sequence
caactttccc

SEQ ID NO: 4541 - DNA, 10 bp, Artificial Sequence
  Synthetic Sequence
tgtaaacccg

SEQ ID NO: 4542 - DNA, 10 bp, Artificial Sequence
  Synthetic Sequence
gtgggcaact

SEQ ID NO: 4543 - DNA, 10 bp, Artificial Sequence
  Synthetic Sequence
tttcgtccgc

SEQ ID NO: 4544 - DNA, 10 bp, Artificial Sequence
  Synthetic Sequence
acgctggtga

SEQ ID NO: 4545 - DNA, 10 bp, Artificial Sequence
  Synthetic Sequence
acaaattcca

SEQ ID NO: 4546 - DNA, 10 bp, Artificial Sequence
  Synthetic Sequence
atagcgcgcg

SEQ ID NO: 4547 - DNA, 10 bp, Artificial Sequence
  Synthetic Sequence
aagtatcccg

SEQ ID NO: 4548 - DNA, 10 bp, Artificial Sequence
  Synthetic Sequence
cggtagtggg

SEQ ID NO: 4549 - DNA, 10 bp, Artificial Sequence
  Synthetic Sequence
tgaacgccag

SEQ ID NO: 4550 - DNA, 10 bp, Artificial Sequence
  Synthetic Sequence
aatgatgagc

SEQ ID NO: 4551 - DNA, 10 bp, Artificial Sequence
  Synthetic Sequence
gaatcgaaac

SEQ ID NO: 4552 - DNA, 10 bp, Artificial Sequence
  Synthetic Sequence
atgcccaacg

SEQ ID NO: 4553 - DNA, 10 bp, Artificial Sequence
  Synthetic Sequence
agcgcggtaa

SEQ ID NO: 4554 - DNA, 10 bp, Artificial Sequence
  Synthetic Sequence
ctgagcaaca

SEQ ID NO: 4555 - DNA, 10 bp, Artificial Sequence
  Synthetic Sequence
tgtataatcg

SEQ ID NO: 4556 - DNA, 10 bp, Artificial Sequence
  Synthetic Sequence
ccaaccatca

SEQ ID NO: 4557 - DNA, 10 bp, Artificial Sequence
  Synthetic Sequence
atctcgcttt

SEQ ID NO: 4558 - DNA, 10 bp, Artificial Sequence
  Synthetic Sequence
cttacgtccc

SEQ ID NO: 4559 - DNA, 10 bp, Artificial Sequence
  Synthetic Sequence
gtcgaaacac

SEQ ID NO: 4560 - DNA, 10 bp, Artificial Sequence
  Synthetic Sequence
cttacgattc

SEQ ID NO: 4561 - DNA, 10 bp, Artificial Sequence
  Synthetic Sequence
agtggtagca

SEQ ID NO: 4562 - DNA, 10 bp, Artificial Sequence
  Synthetic Sequence
acctcaaccg

SEQ ID NO: 4563 - DNA, 10 bp, Artificial Sequence
  Synthetic Sequence
tcatcccggt

SEQ ID NO: 4564 - DNA, 10 bp, Artificial Sequence
  Synthetic Sequence
catacgtcaa

SEQ ID NO: 4565 - DNA, 10 bp, Artificial Sequence
  Synthetic Sequence
gcgcgaatta

SEQ ID NO: 4566 - DNA, 10 bp, Artificial Sequence
  Synthetic Sequence
taacctgagc

SEQ ID NO: 4567 - DNA, 10 bp, Artificial Sequence
  Synthetic Sequence
cgatctcaat

SEQ ID NO: 4568 - DNA, 10 bp, Artificial Sequence
  Synthetic Sequence
ttatcgacac

SEQ ID NO: 4569 - DNA, 10 bp, Artificial Sequence
  Synthetic Sequence
gatgatgact

SEQ ID NO: 4570 - DNA, 10 bp, Artificial Sequence
  Synthetic Sequence
tgagctaatc

SEQ ID NO: 4571 - DNA, 10 bp, Artificial Sequence
  Synthetic Sequence
accatgatag

SEQ ID NO: 4572 - DNA, 10 bp, Artificial Sequence
  Synthetic Sequence
ttgaagtagt

SEQ ID NO: 4573 - DNA, 10 bp, Artificial Sequence
  Synthetic Sequence
gattcaatgt

SEQ ID NO: 4574 - DNA, 10 bp, Artificial Sequence
  Synthetic Sequence
atggtattat

SEQ ID NO: 4575 - DNA, 10 bp, Artificial Sequence
  Synthetic Sequence
atcacctcga

SEQ ID NO: 4576 - DNA, 10 bp, Artificial Sequence
  Synthetic Sequence
gttcaggtaa

SEQ ID NO: 4577 - DNA, 10 bp, Artificial Sequence
  Synthetic Sequence
aagccgaatc

SEQ ID NO: 4578 - DNA, 10 bp, Artificial Sequence
  Synthetic Sequence
tgtatggaat

SEQ ID NO: 4579 - DNA, 10 bp, Artificial Sequence
  Synthetic Sequence
catgcgaccc

SEQ ID NO: 4580 - DNA, 10 bp, Artificial Sequence
  Synthetic Sequence
gctactgcga

SEQ ID NO: 4581 - DNA, 10 bp, Artificial Sequence
  Synthetic Sequence
ttgtccgacc

SEQ ID NO: 4582 - DNA, 10 bp, Artificial Sequence
  Synthetic Sequence
gtattagagc

SEQ ID NO: 4583 - DNA, 10 bp, Artificial Sequence
  Synthetic Sequence
gccagtgtgc

SEQ ID NO: 4584 - DNA, 10 bp, Artificial Sequence
  Synthetic Sequence
ggaaattatc

SEQ ID NO: 4585 - DNA, 10 bp, Artificial Sequence
  Synthetic Sequence
taagggtgta

SEQ ID NO: 4586 - DNA, 10 bp, Artificial Sequence
  Synthetic Sequence
tttgccactt

SEQ ID NO: 4587 - DNA, 10 bp, Artificial Sequence
  Synthetic Sequence
tctatacata

SEQ ID NO: 4588 - DNA, 10 bp, Artificial Sequence
  Synthetic Sequence
ttgagagggt

SEQ ID NO: 4589 - DNA, 10 bp, Artificial Sequence
  Synthetic Sequence
catccgcgca

SEQ ID NO: 4590 - DNA, 10 bp, Artificial Sequence
  Synthetic Sequence
attgccaccg

SEQ ID NO: 4591 - DNA, 10 bp, Artificial Sequence
  Synthetic Sequence
ggcattcctc

SEQ ID NO: 4592 - DNA, 10 bp, Artificial Sequence
  Synthetic Sequence
cataattatt

SEQ ID NO: 4593 - DNA, 10 bp, Artificial Sequence
  Synthetic Sequence
aacctacagc

SEQ ID NO: 4594 - DNA, 10 bp, Artificial Sequence
  Synthetic Sequence
acactgtcaa

SEQ ID NO: 4595 - DNA, 10 bp, Artificial Sequence
  Synthetic Sequence
acagggcgat

SEQ ID NO: 4596 - DNA, 10 bp, Artificial Sequence
  Synthetic Sequence
gggagtactt

SEQ ID NO: 4597 - DNA, 10 bp, Artificial Sequence
  Synthetic Sequence
acgcgtatct

SEQ ID NO: 4598 - DNA, 10 bp, Artificial Sequence
  Synthetic Sequence
cttctgggaa

SEQ ID NO: 4599 - DNA, 10 bp, Artificial Sequence
  Synthetic Sequence
gtggcgggaa

SEQ ID NO: 4600 - DNA, 10 bp, Artificial Sequence
  Synthetic Sequence
acatattata

SEQ ID NO: 4601 - DNA, 10 bp, Artificial Sequence
  Synthetic Sequence
cgctctagcc

SEQ ID NO: 4602 - DNA, 10 bp, Artificial Sequence
  Synthetic Sequence
agccattgta

SEQ ID NO: 4603 - DNA, 10 bp, Artificial Sequence
  Synthetic Sequence
gctaatacct

SEQ ID NO: 4604 - DNA, 10 bp, Artificial Sequence
  Synthetic Sequence
caggataggc

SEQ ID NO: 4605 - DNA, 10 bp, Artificial Sequence
  Synthetic Sequence
ttggtagaca

SEQ ID NO: 4606 - DNA, 10 bp, Artificial Sequence
  Synthetic Sequence
cgcgacgtgt

SEQ ID NO: 4607 - DNA, 10 bp, Artificial Sequence
  Synthetic Sequence
gcttcacatc

SEQ ID NO: 4608 - DNA, 10 bp, Artificial Sequence
  Synthetic Sequence
cactacgtat

SEQ ID NO: 4609 - DNA, 10 bp, Artificial Sequence
  Synthetic Sequence
ggttcttgcc

SEQ ID NO: 4610 - DNA, 10 bp, Artificial Sequence
  Synthetic Sequence
ctccgccgtt

SEQ ID NO: 4611 - DNA, 10 bp, Artificial Sequence
  Synthetic Sequence
ccgtgtcttt

SEQ ID NO: 4612 - DNA, 10 bp, Artificial Sequence
  Synthetic Sequence
gtatggcccg

SEQ ID NO: 4613 - DNA, 10 bp, Artificial Sequence
  Synthetic Sequence
cacattccaa

SEQ ID NO: 4614 - DNA, 10 bp, Artificial Sequence
  Synthetic Sequence
acgatagcta

SEQ ID NO: 4615 - DNA, 10 bp, Artificial Sequence
  Synthetic Sequence
gccaaccgaa

SEQ ID NO: 4616 - DNA, 10 bp, Artificial Sequence
  Synthetic Sequence
gactatgcac

SEQ ID NO: 4617 - DNA, 10 bp, Artificial Sequence
  Synthetic Sequence
gttctagcgc

SEQ ID NO: 4618 - DNA, 10 bp, Artificial Sequence
  Synthetic Sequence
ttatatctac

SEQ ID NO: 4619 - DNA, 10 bp, Artificial Sequence
  Synthetic Sequence
cagagatgct

SEQ ID NO: 4620 - DNA, 10 bp, Artificial Sequence
  Synthetic Sequence
accggtgttc

SEQ ID NO: 4621 - DNA, 10 bp, Artificial Sequence
  Synthetic Sequence
ataacacttt

SEQ ID NO: 4622 - DNA, 10 bp, Artificial Sequence
  Synthetic Sequence
gggaacacgt

SEQ ID NO: 4623 - DNA, 10 bp, Artificial Sequence
  Synthetic Sequence
aaaggcgtca

SEQ ID NO: 4624 - DNA, 10 bp, Artificial Sequence
  Synthetic Sequence
gggcgttata

SEQ ID NO: 4625 - DNA, 10 bp, Artificial Sequence
  Synthetic Sequence
gtcgacttgt

SEQ ID NO: 4626 - DNA, 10 bp, Artificial Sequence
  Synthetic Sequence
ggaataaact

SEQ ID NO: 4627 - DNA, 10 bp, Artificial Sequence
  Synthetic Sequence
ttgaggtgac

SEQ ID NO: 4628 - DNA, 10 bp, Artificial Sequence
  Synthetic Sequence
atgttcttct

SEQ ID NO: 4629 - DNA, 10 bp, Artificial Sequence
  Synthetic Sequence
atcttactgc

SEQ ID NO: 4630 - DNA, 10 bp, Artificial Sequence
  Synthetic Sequence
ccgatgcttc

SEQ ID NO: 4631 - DNA, 10 bp, Artificial Sequence
  Synthetic Sequence
tacacttatt

SEQ ID NO: 4632 - DNA, 10 bp, Artificial Sequence
  Synthetic Sequence
aaattcttcc

SEQ ID NO: 4633 - DNA, 10 bp, Artificial Sequence
  Synthetic Sequence
gctacgtcat

SEQ ID NO: 4634 - DNA, 10 bp, Artificial Sequence
  Synthetic Sequence
gagttcaaca

SEQ ID NO: 4635 - DNA, 10 bp, Artificial Sequence
  Synthetic Sequence
ctatgccttc

SEQ ID NO: 4636 - DNA, 10 bp, Artificial Sequence
  Synthetic Sequence
aaacatgaac

SEQ ID NO: 4637 - DNA, 10 bp, Artificial Sequence
  Synthetic Sequence
ccagatcgtc

SEQ ID NO: 4638 - DNA, 10 bp, Artificial Sequence
  Synthetic Sequence
cagacacgca

SEQ ID NO: 4639 - DNA, 10 bp, Artificial Sequence
  Synthetic Sequence
gctcggttgg

SEQ ID NO: 4640 - DNA, 10 bp, Artificial Sequence
  Synthetic Sequence
gaattacatt

SEQ ID NO: 4641 - DNA, 10 bp, Artificial Sequence
  Synthetic Sequence
tagcttgacg

SEQ ID NO: 4642 - DNA, 10 bp, Artificial Sequence
  Synthetic Sequence
aggaagtgac

SEQ ID NO: 4643 - DNA, 10 bp, Artificial Sequence
  Synthetic Sequence
ccctgggcaa

SEQ ID NO: 4644 - DNA, 10 bp, Artificial Sequence
  Synthetic Sequence
tcggcagtcg

SEQ ID NO: 4645 - DNA, 10 bp, Artificial Sequence
  Synthetic Sequence
ggctaccgca

SEQ ID NO: 4646 - DNA, 10 bp, Artificial Sequence
  Synthetic Sequence
gttgatggac

SEQ ID NO: 4647 - DNA, 10 bp, Artificial Sequence
  Synthetic Sequence
accacgaacc

SEQ ID NO: 4648 - DNA, 10 bp, Artificial Sequence
  Synthetic Sequence
ccacacgtcg

SEQ ID NO: 4649 - DNA, 10 bp, Artificial Sequence
  Synthetic Sequence
aactttgatc

SEQ ID NO: 4650 - DNA, 10 bp, Artificial Sequence
  Synthetic Sequence
agcgggcaat

SEQ ID NO: 4651 - DNA, 10 bp, Artificial Sequence
  Synthetic Sequence
gtaccgagaa

SEQ ID NO: 4652 - DNA, 10 bp, Artificial Sequence
  Synthetic Sequence
gcggcacaac

SEQ ID NO: 4653 - DNA, 10 bp, Artificial Sequence
  Synthetic Sequence
atagggacag

SEQ ID NO: 4654 - DNA, 10 bp, Artificial Sequence
  Synthetic Sequence
cactaaacga

SEQ ID NO: 4655 - DNA, 10 bp, Artificial Sequence
  Synthetic Sequence
atggcctcaa

SEQ ID NO: 4656 - DNA, 10 bp, Artificial Sequence
  Synthetic Sequence
gcttatggta

SEQ ID NO: 4657 - DNA, 10 bp, Artificial Sequence
  Synthetic Sequence
ttcgacctgc

SEQ ID NO: 4658 - DNA, 10 bp, Artificial Sequence
  Synthetic Sequence
cggtttagaa

SEQ ID NO: 4659 - DNA, 10 bp, Artificial Sequence
  Synthetic Sequence
tgtcggtcac

SEQ ID NO: 4660 - DNA, 10 bp, Artificial Sequence
  Synthetic Sequence
aacggctcac

SEQ ID NO: 4661 - DNA, 10 bp, Artificial Sequence
  Synthetic Sequence
agcaccatgt

SEQ ID NO: 4662 - DNA, 10 bp, Artificial Sequence
  Synthetic Sequence
aaacgcacgc

SEQ ID NO: 4663 - DNA, 10 bp, Artificial Sequence
  Synthetic Sequence
cccgcgttat

SEQ ID NO: 4664 - DNA, 10 bp, Artificial Sequence
  Synthetic Sequence
gaggcctgct

SEQ ID NO: 4665 - DNA, 10 bp, Artificial Sequence
  Synthetic Sequence
catgctacaa

SEQ ID NO: 4666 - DNA, 10 bp, Artificial Sequence
  Synthetic Sequence
gtcctgagcg

SEQ ID NO: 4667 - DNA, 10 bp, Artificial Sequence
  Synthetic Sequence
cctttgatca

SEQ ID NO: 4668 - DNA, 10 bp, Artificial Sequence
  Synthetic Sequence
agggcttgtg

SEQ ID NO: 4669 - DNA, 10 bp, Artificial Sequence
  Synthetic Sequence
gagccctcaa

SEQ ID NO: 4670 - DNA, 10 bp, Artificial Sequence
  Synthetic Sequence
cggtgcggat

SEQ ID NO: 4671 - DNA, 10 bp, Artificial Sequence
  Synthetic Sequence
atcttcatac

SEQ ID NO: 4672 - DNA, 10 bp, Artificial Sequence
  Synthetic Sequence
ccgcctcgtt

SEQ ID NO: 4673 - DNA, 10 bp, Artificial Sequence
  Synthetic Sequence
caccgtgatg

SEQ ID NO: 4674 - DNA, 10 bp, Artificial Sequence
  Synthetic Sequence
actagttgga

SEQ ID NO: 4675 - DNA, 10 bp, Artificial Sequence
  Synthetic Sequence
actatggtcg

SEQ ID NO: 4676 - DNA, 10 bp, Artificial Sequence
  Synthetic Sequence
tctctcgcac

SEQ ID NO: 4677 - DNA, 10 bp, Artificial Sequence
  Synthetic Sequence
tttaccctaa

SEQ ID NO: 4678 - DNA, 10 bp, Artificial Sequence
  Synthetic Sequence
cccttggacc

SEQ ID NO: 4679 - DNA, 10 bp, Artificial Sequence
  Synthetic Sequence
actcgaataa

SEQ ID NO: 4680 - DNA, 10 bp, Artificial Sequence
  Synthetic Sequence
tcgtcttagt

SEQ ID NO: 4681 - DNA, 10 bp, Artificial Sequence
  Synthetic Sequence
cggatactgc

SEQ ID NO: 4682 - DNA, 10 bp, Artificial Sequence
  Synthetic Sequence
ctaggccagc

SEQ ID NO: 4683 - DNA, 10 bp, Artificial Sequence
  Synthetic Sequence
gtagtacgag

SEQ ID NO: 4684 - DNA, 10 bp, Artificial Sequence
  Synthetic Sequence
cggttcgcag

SEQ ID NO: 4685 - DNA, 10 bp, Artificial Sequence
  Synthetic Sequence
atttctcgct

SEQ ID NO: 4686 - DNA, 10 bp, Artificial Sequence
  Synthetic Sequence
gctcggcact

SEQ ID NO: 4687 - DNA, 10 bp, Artificial Sequence
  Synthetic Sequence
gtatacgggc

SEQ ID NO: 4688 - DNA, 10 bp, Artificial Sequence
  Synthetic Sequence
gcatccaagc

SEQ ID NO: 4689 - DNA, 10 bp, Artificial Sequence
  Synthetic Sequence
gggcgcgttt

SEQ ID NO: 4690 - DNA, 10 bp, Artificial Sequence
  Synthetic Sequence
taggctgcgt

SEQ ID NO: 4691 - DNA, 10 bp, Artificial Sequence
  Synthetic Sequence
aagcagctta

SEQ ID NO: 4692 - DNA, 10 bp, Artificial Sequence
  Synthetic Sequence
aacagtgact

SEQ ID NO: 4693 - DNA, 10 bp, Artificial Sequence
  Synthetic Sequence
gggcacagct

SEQ ID NO: 4694 - DNA, 10 bp, Artificial Sequence
  Synthetic Sequence
cacaaccatt

SEQ ID NO: 4695 - DNA, 10 bp, Artificial Sequence
  Synthetic Sequence
tcatttcgtc

SEQ ID NO: 4696 - DNA, 10 bp, Artificial Sequence
  Synthetic Sequence
gtctcccatt

SEQ ID NO: 4697 - DNA, 10 bp, Artificial Sequence
  Synthetic Sequence
gcaggatgag

SEQ ID NO: 4698 - DNA, 10 bp, Artificial Sequence
  Synthetic Sequence
cttcaacata

SEQ ID NO: 4699 - DNA, 10 bp, Artificial Sequence
  Synthetic Sequence
tcggttgtgg

SEQ ID NO: 4700 - DNA, 10 bp, Artificial Sequence
  Synthetic Sequence
aagtccgtac

SEQ ID NO: 4701 - DNA, 10 bp, Artificial Sequence
  Synthetic Sequence
tgaggccctg

SEQ ID NO: 4702 - DNA, 10 bp, Artificial Sequence
  Synthetic Sequence
tgtatcgtga

SEQ ID NO: 4703 - DNA, 10 bp, Artificial Sequence
  Synthetic Sequence
tcgacatggg

SEQ ID NO: 4704 - DNA, 10 bp, Artificial Sequence
  Synthetic Sequence
cgtgctggga

SEQ ID NO: 4705 - DNA, 10 bp, Artificial Sequence
  Synthetic Sequence
ctcacagaat

SEQ ID NO: 4706 - DNA, 10 bp, Artificial Sequence
  Synthetic Sequence
gtttcggtga

SEQ ID NO: 4707 - DNA, 10 bp, Artificial Sequence
  Synthetic Sequence
ccaccctaac

SEQ ID NO: 4708 - DNA, 10 bp, Artificial Sequence
  Synthetic Sequence
gcgatctagt

SEQ ID NO: 4709 - DNA, 10 bp, Artificial Sequence
  Synthetic Sequence
caatgtctcg

SEQ ID NO: 4710 - DNA, 10 bp, Artificial Sequence
  Synthetic Sequence
gagactgact

SEQ ID NO: 4711 - DNA, 10 bp, Artificial Sequence
  Synthetic Sequence
gaggtggcac

SEQ ID NO: 4712 - DNA, 10 bp, Artificial Sequence
  Synthetic Sequence
atgatagcac

SEQ ID NO: 4713 - DNA, 10 bp, Artificial Sequence
  Synthetic Sequence
taatgatagg

SEQ ID NO: 4714 - DNA, 10 bp, Artificial Sequence
  Synthetic Sequence
cagggctgtc

SEQ ID NO: 4715 - DNA, 10 bp, Artificial Sequence
  Synthetic Sequence
gtaaagagag

SEQ ID NO: 4716 - DNA, 10 bp, Artificial Sequence
  Synthetic Sequence
caggtgtgta

SEQ ID NO: 4717 - DNA, 10 bp, Artificial Sequence
  Synthetic Sequence
taggtaaata

SEQ ID NO: 4718 - DNA, 10 bp, Artificial Sequence
  Synthetic Sequence
ttctgatgac

SEQ ID NO: 4719 - DNA, 10 bp, Artificial Sequence
  Synthetic Sequence
gaaacgagat

SEQ ID NO: 4720 - DNA, 10 bp, Artificial Sequence
  Synthetic Sequence
tttcgatctc

SEQ ID NO: 4721 - DNA, 10 bp, Artificial Sequence
  Synthetic Sequence
atatgatgat

SEQ ID NO: 4722 - DNA, 10 bp, Artificial Sequence
  Synthetic Sequence
gcggcggaat

SEQ ID NO: 4723 - DNA, 10 bp, Artificial Sequence
  Synthetic Sequence
tgagctgtcc

SEQ ID NO: 4724 - DNA, 10 bp, Artificial Sequence
  Synthetic Sequence
ggttcatgag

SEQ ID NO: 4725 - DNA, 10 bp, Artificial Sequence
  Synthetic Sequence
agcgggacgt

SEQ ID NO: 4726 - DNA, 10 bp, Artificial Sequence
  Synthetic Sequence
gacatgagta

SEQ ID NO: 4727 - DNA, 10 bp, Artificial Sequence
  Synthetic Sequence
gagaatgcta

SEQ ID NO: 4728 - DNA, 10 bp, Artificial Sequence
  Synthetic Sequence
ttgcgtgagt

SEQ ID NO: 4729 - DNA, 10 bp, Artificial Sequence
  Synthetic Sequence
gtcagatttc

SEQ ID NO: 4730 - DNA, 10 bp, Artificial Sequence
  Synthetic Sequence
aggactctca

SEQ ID NO: 4731 - DNA, 10 bp, Artificial Sequence
  Synthetic Sequence
cattggtcga

SEQ ID NO: 4732 - DNA, 10 bp, Artificial Sequence
  Synthetic Sequence
agggacgatc

SEQ ID NO: 4733 - DNA, 10 bp, Artificial Sequence
  Synthetic Sequence
tagtttcgcc

SEQ ID NO: 4734 - DNA, 10 bp, Artificial Sequence
  Synthetic Sequence
gaagttacat

SEQ ID NO: 4735 - DNA, 10 bp, Artificial Sequence
  Synthetic Sequence
cgctgtaatt

SEQ ID NO: 4736 - DNA, 10 bp, Artificial Sequence
  Synthetic Sequence
ctcgatctta

SEQ ID NO: 4737 - DNA, 10 bp, Artificial Sequence
  Synthetic Sequence
ctgaaatccc

SEQ ID NO: 4738 - DNA, 10 bp, Artificial Sequence
  Synthetic Sequence
gatttaccgc

SEQ ID NO: 4739 - DNA, 10 bp, Artificial Sequence
  Synthetic Sequence
cggtaaccac

SEQ ID NO: 4740 - DNA, 10 bp, Artificial Sequence
  Synthetic Sequence
cgaaagtaaa

SEQ ID NO: 4741 - DNA, 10 bp, Artificial Sequence
  Synthetic Sequence
tcgcttggga

SEQ ID NO: 4742 - DNA, 10 bp, Artificial Sequence
  Synthetic Sequence
acgcagcggt

SEQ ID NO: 4743 - DNA, 10 bp, Artificial Sequence
  Synthetic Sequence
ccagacaaat

SEQ ID NO: 4744 - DNA, 10 bp, Artificial Sequence
  Synthetic Sequence
acactcgaca

SEQ ID NO: 4745 - DNA, 10 bp, Artificial Sequence
  Synthetic Sequence
cagttactcc

SEQ ID NO: 4746 - DNA, 10 bp, Artificial Sequence
  Synthetic Sequence
attccgtaga

SEQ ID NO: 4747 - DNA, 10 bp, Artificial Sequence
  Synthetic Sequence
tatgtaaccc

SEQ ID NO: 4748 - DNA, 10 bp, Artificial Sequence
  Synthetic Sequence
gcgaagaaag

SEQ ID NO: 4749 - DNA, 10 bp, Artificial Sequence
  Synthetic Sequence
cagctccaag

SEQ ID NO: 4750 - DNA, 10 bp, Artificial Sequence
  Synthetic Sequence
catggtgcga

SEQ ID NO: 4751 - DNA, 10 bp, Artificial Sequence
  Synthetic Sequence
atgctggcct

SEQ ID NO: 4752 - DNA, 10 bp, Artificial Sequence
  Synthetic Sequence
ttgcagaact

SEQ ID NO: 4753 - DNA, 10 bp, Artificial Sequence
  Synthetic Sequence
ggttaaaccg

SEQ ID NO: 4754 - DNA, 10 bp, Artificial Sequence
  Synthetic Sequence
ccacagatct

SEQ ID NO: 4755 - DNA, 10 bp, Artificial Sequence
  Synthetic Sequence
atggcgactc

SEQ ID NO: 4756 - DNA, 10 bp, Artificial Sequence
  Synthetic Sequence
ggattcgacc

SEQ ID NO: 4757 - DNA, 10 bp, Artificial Sequence
  Synthetic Sequence
aaattaggtc

SEQ ID NO: 4758 - DNA, 10 bp, Artificial Sequence
  Synthetic Sequence
tagttgtcga

SEQ ID NO: 4759 - DNA, 10 bp, Artificial Sequence
  Synthetic Sequence
ccaccgtagt

SEQ ID NO: 4760 - DNA, 10 bp, Artificial Sequence
  Synthetic Sequence
attgaatcgc

SEQ ID NO: 4761 - DNA, 10 bp, Artificial Sequence
  Synthetic Sequence
ctattcagtc

SEQ ID NO: 4762 - DNA, 10 bp, Artificial Sequence
  Synthetic Sequence
gtgcaaactt

SEQ ID NO: 4763 - DNA, 10 bp, Artificial Sequence
  Synthetic Sequence
tttactgtgt

SEQ ID NO: 4764 - DNA, 10 bp, Artificial Sequence
  Synthetic Sequence
ttcgccagag

SEQ ID NO: 4765 - DNA, 10 bp, Artificial Sequence
  Synthetic Sequence
aaccgttatc

SEQ ID NO: 4766 - DNA, 10 bp, Artificial Sequence
  Synthetic Sequence
cggtttccat

SEQ ID NO: 4767 - DNA, 10 bp, Artificial Sequence
  Synthetic Sequence
gttgaatgaa

SEQ ID NO: 4768 - DNA, 10 bp, Artificial Sequence
  Synthetic Sequence
gtcagggtgt

SEQ ID NO: 4769 - DNA, 10 bp, Artificial Sequence
  Synthetic Sequence
atagctgaac

SEQ ID NO: 4770 - DNA, 10 bp, Artificial Sequence
  Synthetic Sequence
gaaataaccg

SEQ ID NO: 4771 - DNA, 10 bp, Artificial Sequence
  Synthetic Sequence
gcagtgccag

SEQ ID NO: 4772 - DNA, 10 bp, Artificial Sequence
  Synthetic Sequence
agtgcacacg

SEQ ID NO: 4773 - DNA, 10 bp, Artificial Sequence
  Synthetic Sequence
ctacctgtca

SEQ ID NO: 4774 - DNA, 10 bp, Artificial Sequence
  Synthetic Sequence
aaatttctgg

SEQ ID NO: 4775 - DNA, 10 bp, Artificial Sequence
  Synthetic Sequence
ttgcacccgc

SEQ ID NO: 4776 - DNA, 10 bp, Artificial Sequence
  Synthetic Sequence
gatatgcatt

SEQ ID NO: 4777 - DNA, 10 bp, Artificial Sequence
  Synthetic Sequence
aatcgccagg

SEQ ID NO: 4778 - DNA, 10 bp, Artificial Sequence
  Synthetic Sequence
cagtagacgg

SEQ ID NO: 4779 - DNA, 10 bp, Artificial Sequence
  Synthetic Sequence
caagactatc

SEQ ID NO: 4780 - DNA, 10 bp, Artificial Sequence
  Synthetic Sequence
atatacaaac

SEQ ID NO: 4781 - DNA, 10 bp, Artificial Sequence
  Synthetic Sequence
tcctagcagg

SEQ ID NO: 4782 - DNA, 10 bp, Artificial Sequence
  Synthetic Sequence
cctctttaga

SEQ ID NO: 4783 - DNA, 10 bp, Artificial Sequence
  Synthetic Sequence
gagatggctt

SEQ ID NO: 4784 - DNA, 10 bp, Artificial Sequence
  Synthetic Sequence
atatagaatt

SEQ ID NO: 4785 - DNA, 10 bp, Artificial Sequence
  Synthetic Sequence
agttattaag

SEQ ID NO: 4786 - DNA, 10 bp, Artificial Sequence
  Synthetic Sequence
tagggcagta

SEQ ID NO: 4787 - DNA, 10 bp, Artificial Sequence
  Synthetic Sequence
gtggtgctga

SEQ ID NO: 4788 - DNA, 10 bp, Artificial Sequence
  Synthetic Sequence
cctgagtcga

SEQ ID NO: 4789 - DNA, 10 bp, Artificial Sequence
  Synthetic Sequence
tctacagaat

SEQ ID NO: 4790 - DNA, 10 bp, Artificial Sequence
  Synthetic Sequence
gcagcttatt

SEQ ID NO: 4791 - DNA, 10 bp, Artificial Sequence
  Synthetic Sequence
ccgcgaagct

SEQ ID NO: 4792 - DNA, 10 bp, Artificial Sequence
  Synthetic Sequence
cctattagag

SEQ ID NO: 4793 - DNA, 10 bp, Artificial Sequence
  Synthetic Sequence
tcctttcaga

SEQ ID NO: 4794 - DNA, 10 bp, Artificial Sequence
  Synthetic Sequence
cgatttaagc

SEQ ID NO: 4795 - DNA, 10 bp, Artificial Sequence
  Synthetic Sequence
caaccgacgg

SEQ ID NO: 4796 - DNA, 10 bp, Artificial Sequence
  Synthetic Sequence
accgacaggt

SEQ ID NO: 4797 - DNA, 10 bp, Artificial Sequence
  Synthetic Sequence
agctactcgg

SEQ ID NO: 4798 - DNA, 10 bp, Artificial Sequence
  Synthetic Sequence
tctagggatg

SEQ ID NO: 4799 - DNA, 10 bp, Artificial Sequence
  Synthetic Sequence
gcagctccct

SEQ ID NO: 4800 - DNA, 10 bp, Artificial Sequence
  Synthetic Sequence
ctgatgagtc

SEQ ID NO: 4801 - DNA, 10 bp, Artificial Sequence
  Synthetic Sequence
gatacaccag

SEQ ID NO: 4802 - DNA, 10 bp, Artificial Sequence
  Synthetic Sequence
cacccgaaca

SEQ ID NO: 4803 - DNA, 10 bp, Artificial Sequence
  Synthetic Sequence
taccggccac

SEQ ID NO: 4804 - DNA, 10 bp, Artificial Sequence
  Synthetic Sequence
gcgctgctac

SEQ ID NO: 4805 - DNA, 10 bp, Artificial Sequence
  Synthetic Sequence
gctggttgct

SEQ ID NO: 4806 - DNA, 10 bp, Artificial Sequence
  Synthetic Sequence
tgtaatacag

SEQ ID NO: 4807 - DNA, 10 bp, Artificial Sequence
  Synthetic Sequence
catccttaac

SEQ ID NO: 4808 - DNA, 10 bp, Artificial Sequence
  Synthetic Sequence
tgttcatttc

SEQ ID NO: 4809 - DNA, 10 bp, Artificial Sequence
  Synthetic Sequence
gtctcctcgc

SEQ ID NO: 4810 - DNA, 10 bp, Artificial Sequence
  Synthetic Sequence
cagtacccag

SEQ ID NO: 4811 - DNA, 10 bp, Artificial Sequence
  Synthetic Sequence
gttggcaggt

SEQ ID NO: 4812 - DNA, 10 bp, Artificial Sequence
  Synthetic Sequence
atcaatctca

SEQ ID NO: 4813 - DNA, 10 bp, Artificial Sequence
  Synthetic Sequence
cttcccgtgg

SEQ ID NO: 4814 - DNA, 10 bp, Artificial Sequence
  Synthetic Sequence
cgaatcacga

SEQ ID NO: 4815 - DNA, 10 bp, Artificial Sequence
  Synthetic Sequence
acgcaaccgg

SEQ ID NO: 4816 - DNA, 10 bp, Artificial Sequence
  Synthetic Sequence
gattgacttg

SEQ ID NO: 4817 - DNA, 10 bp, Artificial Sequence
  Synthetic Sequence
gaaggcatct

SEQ ID NO: 4818 - DNA, 10 bp, Artificial Sequence
  Synthetic Sequence
gcagaggtgc

SEQ ID NO: 4819 - DNA, 10 bp, Artificial Sequence
  Synthetic Sequence
ggcacacaaa

SEQ ID NO: 4820 - DNA, 10 bp, Artificial Sequence
  Synthetic Sequence
aattgcactc

SEQ ID NO: 4821 - DNA, 10 bp, Artificial Sequence
  Synthetic Sequence
cgcttcgtct

SEQ ID NO: 4822 - DNA, 10 bp, Artificial Sequence
  Synthetic Sequence
gtgccatagt

SEQ ID NO: 4823 - DNA, 10 bp, Artificial Sequence
  Synthetic Sequence
tcaactgttc

SEQ ID NO: 4824 - DNA, 10 bp, Artificial Sequence
  Synthetic Sequence
acacaaccct

SEQ ID NO: 4825 - DNA, 10 bp, Artificial Sequence
  Synthetic Sequence
tgcggttccc

SEQ ID NO: 4826 - DNA, 10 bp, Artificial Sequence
  Synthetic Sequence
cgccctaaga

SEQ ID NO: 4827 - DNA, 10 bp, Artificial Sequence
  Synthetic Sequence
atccctcttc

SEQ ID NO: 4828 - DNA, 10 bp, Artificial Sequence
  Synthetic Sequence
tgacgaattc

SEQ ID NO: 4829 - DNA, 10 bp, Artificial Sequence
  Synthetic Sequence
tgacctatcg

SEQ ID NO: 4830 - DNA, 10 bp, Artificial Sequence
  Synthetic Sequence
acaggtacac

SEQ ID NO: 4831 - DNA, 10 bp, Artificial Sequence
  Synthetic Sequence
atgacttggt

SEQ ID NO: 4832 - DNA, 10 bp, Artificial Sequence
  Synthetic Sequence
ttagtgtaac

SEQ ID NO: 4833 - DNA, 10 bp, Artificial Sequence
  Synthetic Sequence
taagcaagtg

SEQ ID NO: 4834 - DNA, 10 bp, Artificial Sequence
  Synthetic Sequence
tggacagccc

SEQ ID NO: 4835 - DNA, 10 bp, Artificial Sequence
  Synthetic Sequence
cgtagggacg

SEQ ID NO: 4836 - DNA, 10 bp, Artificial Sequence
  Synthetic Sequence
ataggcaggc

SEQ ID NO: 4837 - DNA, 10 bp, Artificial Sequence
  Synthetic Sequence
ctagttccat

SEQ ID NO: 4838 - DNA, 10 bp, Artificial Sequence
  Synthetic Sequence
attactctgc

SEQ ID NO: 4839 - DNA, 10 bp, Artificial Sequence
  Synthetic Sequence
cgagcttgaa

SEQ ID NO: 4840 - DNA, 10 bp, Artificial Sequence
  Synthetic Sequence
gtgggcgtac

SEQ ID NO: 4841 - DNA, 10 bp, Artificial Sequence
  Synthetic Sequence
ttacttcaag

SEQ ID NO: 4842 - DNA, 10 bp, Artificial Sequence
  Synthetic Sequence
cacgtaatat

SEQ ID NO: 4843 - DNA, 10 bp, Artificial Sequence
  Synthetic Sequence
ctcctccagg

SEQ ID NO: 4844 - DNA, 10 bp, Artificial Sequence
  Synthetic Sequence
cttccctgat

SEQ ID NO: 4845 - DNA, 10 bp, Artificial Sequence
  Synthetic Sequence
ttaatattta

SEQ ID NO: 4846 - DNA, 10 bp, Artificial Sequence
  Synthetic Sequence
aaactgtagt

SEQ ID NO: 4847 - DNA, 10 bp, Artificial Sequence
  Synthetic Sequence
cctgaattgt

SEQ ID NO: 4848 - DNA, 10 bp, Artificial Sequence
  Synthetic Sequence
tagaagtgat

SEQ ID NO: 4849 - DNA, 10 bp, Artificial Sequence
  Synthetic Sequence
ctcatcaggg

SEQ ID NO: 4850 - DNA, 10 bp, Artificial Sequence
  Synthetic Sequence
atatatgctc

SEQ ID NO: 4851 - DNA, 10 bp, Artificial Sequence
  Synthetic Sequence
gtagttatga

SEQ ID NO: 4852 - DNA, 10 bp, Artificial Sequence
  Synthetic Sequence
cagtaaggcg

SEQ ID NO: 4853 - DNA, 10 bp, Artificial Sequence
  Synthetic Sequence
aggcatatag

SEQ ID NO: 4854 - DNA, 10 bp, Artificial Sequence
  Synthetic Sequence
ggagtaggta

SEQ ID NO: 4855 - DNA, 10 bp, Artificial Sequence
  Synthetic Sequence
gctcagaaat

SEQ ID NO: 4856 - DNA, 10 bp, Artificial Sequence
  Synthetic Sequence
aacgctctcg

SEQ ID NO: 4857 - DNA, 10 bp, Artificial Sequence
  Synthetic Sequence
tttcgcttgt

SEQ ID NO: 4858 - DNA, 10 bp, Artificial Sequence
  Synthetic Sequence
accaagtgaa

SEQ ID NO: 4859 - DNA, 10 bp, Artificial Sequence
  Synthetic Sequence
ccaattgtta

SEQ ID NO: 4860 - DNA, 10 bp, Artificial Sequence
  Synthetic Sequence
gagactcccg

SEQ ID NO: 4861 - DNA, 10 bp, Artificial Sequence
  Synthetic Sequence
gacggttggt

SEQ ID NO: 4862 - DNA, 10 bp, Artificial Sequence
  Synthetic Sequence
ggcatgacgt

SEQ ID NO: 4863 - DNA, 10 bp, Artificial Sequence
  Synthetic Sequence
accgcgtaaa

SEQ ID NO: 4864 - DNA, 10 bp, Artificial Sequence
  Synthetic Sequence
gaccgcatcg

SEQ ID NO: 4865 - DNA, 10 bp, Artificial Sequence
  Synthetic Sequence
agcccgatta

SEQ ID NO: 4866 - DNA, 10 bp, Artificial Sequence
  Synthetic Sequence
aatggtctga

SEQ ID NO: 4867 - DNA, 10 bp, Artificial Sequence
  Synthetic Sequence
tcccgtccga

SEQ ID NO: 4868 - DNA, 10 bp, Artificial Sequence
  Synthetic Sequence
atcattaatt

SEQ ID NO: 4869 - DNA, 10 bp, Artificial Sequence
  Synthetic Sequence
gcggagttct

SEQ ID NO: 4870 - DNA, 10 bp, Artificial Sequence
  Synthetic Sequence
tagagctgcg

SEQ ID NO: 4871 - DNA, 10 bp, Artificial Sequence
  Synthetic Sequence
attataattt

SEQ ID NO: 4872 - DNA, 10 bp, Artificial Sequence
  Synthetic Sequence
gcaatctcat

SEQ ID NO: 4873 - DNA, 10 bp, Artificial Sequence
  Synthetic Sequence
caggtcccac

SEQ ID NO: 4874 - DNA, 10 bp, Artificial Sequence
  Synthetic Sequence
atattaagtt

SEQ ID NO: 4875 - DNA, 10 bp, Artificial Sequence
  Synthetic Sequence
caatcaccac

SEQ ID NO: 4876 - DNA, 10 bp, Artificial Sequence
  Synthetic Sequence
ccatgcgaag

SEQ ID NO: 4877 - DNA, 10 bp, Artificial Sequence
  Synthetic Sequence
tggtgagtcg

SEQ ID NO: 4878 - DNA, 10 bp, Artificial Sequence
  Synthetic Sequence
gtgcagtagc

SEQ ID NO: 4879 - DNA, 10 bp, Artificial Sequence
  Synthetic Sequence
gttggttatt

SEQ ID NO: 4880 - DNA, 10 bp, Artificial Sequence
  Synthetic Sequence
gatagatggt

SEQ ID NO: 4881 - DNA, 10 bp, Artificial Sequence
  Synthetic Sequence
gcatacccga

SEQ ID NO: 4882 - DNA, 10 bp, Artificial Sequence
  Synthetic Sequence
aagctcgact

SEQ ID NO: 4883 - DNA, 10 bp, Artificial Sequence
  Synthetic Sequence
cctatacgcg

SEQ ID NO: 4884 - DNA, 10 bp, Artificial Sequence
  Synthetic Sequence
tgctccttaa

SEQ ID NO: 4885 - DNA, 10 bp, Artificial Sequence
  Synthetic Sequence
agtatacatt

SEQ ID NO: 4886 - DNA, 10 bp, Artificial Sequence
  Synthetic Sequence
gtacgcgttc

SEQ ID NO: 4887 - DNA, 10 bp, Artificial Sequence
  Synthetic Sequence
cgtgagttaa

SEQ ID NO: 4888 - DNA, 10 bp, Artificial Sequence
  Synthetic Sequence
ggacaatgag

SEQ ID NO: 4889 - DNA, 10 bp, Artificial Sequence
  Synthetic Sequence
atatttaccg

SEQ ID NO: 4890 - DNA, 10 bp, Artificial Sequence
  Synthetic Sequence
agcacctacg

SEQ ID NO: 4891 - DNA, 10 bp, Artificial Sequence
  Synthetic Sequence
acatctcttg

SEQ ID NO: 4892 - DNA, 10 bp, Artificial Sequence
  Synthetic Sequence
caatgtgcgc

SEQ ID NO: 4893 - DNA, 10 bp, Artificial Sequence
  Synthetic Sequence
atcactgcgc

SEQ ID NO: 4894 - DNA, 10 bp, Artificial Sequence
  Synthetic Sequence
cacgtcttta

SEQ ID NO: 4895 - DNA, 10 bp, Artificial Sequence
  Synthetic Sequence
cagttcgatg

SEQ ID NO: 4896 - DNA, 10 bp, Artificial Sequence
  Synthetic Sequence
cgggctctta

SEQ ID NO: 4897 - DNA, 10 bp, Artificial Sequence
  Synthetic Sequence
gtagaaatat

SEQ ID NO: 4898 - DNA, 10 bp, Artificial Sequence
  Synthetic Sequence
gaattctacg

SEQ ID NO: 4899 - DNA, 10 bp, Artificial Sequence
  Synthetic Sequence
acgcctcctg

SEQ ID NO: 4900 - DNA, 10 bp, Artificial Sequence
  Synthetic Sequence
cttgatgggt

SEQ ID NO: 4901 - DNA, 10 bp, Artificial Sequence
  Synthetic Sequence
cagatgctaa

SEQ ID NO: 4902 - DNA, 10 bp, Artificial Sequence
  Synthetic Sequence
gacacttgct

SEQ ID NO: 4903 - DNA, 10 bp, Artificial Sequence
  Synthetic Sequence
agttccattc

SEQ ID NO: 4904 - DNA, 10 bp, Artificial Sequence
  Synthetic Sequence
ttagttgcac

SEQ ID NO: 4905 - DNA, 10 bp, Artificial Sequence
  Synthetic Sequence
cactaatgcc

SEQ ID NO: 4906 - DNA, 10 bp, Artificial Sequence
  Synthetic Sequence
gggtagcttc

SEQ ID NO: 4907 - DNA, 10 bp, Artificial Sequence
  Synthetic Sequence
ccctgtttag

SEQ ID NO: 4908 - DNA, 10 bp, Artificial Sequence
  Synthetic Sequence
actggacgcc

SEQ ID NO: 4909 - DNA, 10 bp, Artificial Sequence
  Synthetic Sequence
cacatggcca

SEQ ID NO: 4910 - DNA, 10 bp, Artificial Sequence
  Synthetic Sequence
tttgtaacgg

SEQ ID NO: 4911 - DNA, 10 bp, Artificial Sequence
  Synthetic Sequence
ttgagtgata

SEQ ID NO: 4912 - DNA, 10 bp, Artificial Sequence
  Synthetic Sequence
attgttaaga

SEQ ID NO: 4913 - DNA, 10 bp, Artificial Sequence
  Synthetic Sequence
acgctaaata

SEQ ID NO: 4914 - DNA, 10 bp, Artificial Sequence
  Synthetic Sequence
gacatgcgct

SEQ ID NO: 4915 - DNA, 10 bp, Artificial Sequence
  Synthetic Sequence
ataaccgact

SEQ ID NO: 4916 - DNA, 10 bp, Artificial Sequence
  Synthetic Sequence
ggcctaacga

SEQ ID NO: 4917 - DNA, 10 bp, Artificial Sequence
  Synthetic Sequence
gtgttatcgc

SEQ ID NO: 4918 - DNA, 10 bp, Artificial Sequence
  Synthetic Sequence
ttctgttcgc

SEQ ID NO: 4919 - DNA, 10 bp, Artificial Sequence
  Synthetic Sequence
gggacgagac

SEQ ID NO: 4920 - DNA, 10 bp, Artificial Sequence
  Synthetic Sequence
tagcttaatt

SEQ ID NO: 4921 - DNA, 10 bp, Artificial Sequence
  Synthetic Sequence
tcgacatcaa

SEQ ID NO: 4922 - DNA, 10 bp, Artificial Sequence
  Synthetic Sequence
ggcgtaacct

SEQ ID NO: 4923 - DNA, 10 bp, Artificial Sequence
  Synthetic Sequence
caagaactgt

SEQ ID NO: 4924 - DNA, 10 bp, Artificial Sequence
  Synthetic Sequence
gatggccgta

SEQ ID NO: 4925 - DNA, 10 bp, Artificial Sequence
  Synthetic Sequence
gccgatgcct

SEQ ID NO: 4926 - DNA, 10 bp, Artificial Sequence
  Synthetic Sequence
tgcaggaacg

SEQ ID NO: 4927 - DNA, 10 bp, Artificial Sequence
  Synthetic Sequence
ctacgttgcc

SEQ ID NO: 4928 - DNA, 10 bp, Artificial Sequence
  Synthetic Sequence
acgttagtgg

SEQ ID NO: 4929 - DNA, 10 bp, Artificial Sequence
  Synthetic Sequence
tgcgtatccg

SEQ ID NO: 4930 - DNA, 10 bp, Artificial Sequence
  Synthetic Sequence
ttcaataggg

SEQ ID NO: 4931 - DNA, 10 bp, Artificial Sequence
  Synthetic Sequence
agccacaaag

SEQ ID NO: 4932 - DNA, 10 bp, Artificial Sequence
  Synthetic Sequence
ccagtttaat

SEQ ID NO: 4933 - DNA, 10 bp, Artificial Sequence
  Synthetic Sequence
agacaacgta

SEQ ID NO: 4934 - DNA, 10 bp, Artificial Sequence
  Synthetic Sequence
ctgcagggca

SEQ ID NO: 4935 - DNA, 10 bp, Artificial Sequence
  Synthetic Sequence
ggtcaaatgt

SEQ ID NO: 4936 - DNA, 10 bp, Artificial Sequence
  Synthetic Sequence
tgagttacag

SEQ ID NO: 4937 - DNA, 10 bp, Artificial Sequence
  Synthetic Sequence
agccatactt

SEQ ID NO: 4938 - DNA, 10 bp, Artificial Sequence
  Synthetic Sequence
ctcgcgtcct

SEQ ID NO: 4939 - DNA, 10 bp, Artificial Sequence
  Synthetic Sequence
ggttatacgc

SEQ ID NO: 4940 - DNA, 10 bp, Artificial Sequence
  Synthetic Sequence
tacgggtgag

SEQ ID NO: 4941 - DNA, 10 bp, Artificial Sequence
  Synthetic Sequence
cattactgtc

SEQ ID NO: 4942 - DNA, 10 bp, Artificial Sequence
  Synthetic Sequence
ggtagcattc

SEQ ID NO: 4943 - DNA, 10 bp, Artificial Sequence
  Synthetic Sequence
ttattgtaca

SEQ ID NO: 4944 - DNA, 10 bp, Artificial Sequence
  Synthetic Sequence
tattatcacc

SEQ ID NO: 4945 - DNA, 10 bp, Artificial Sequence
  Synthetic Sequence
tatttgccca

SEQ ID NO: 4946 - DNA, 10 bp, Artificial Sequence
  Synthetic Sequence
tgaggtgatg

SEQ ID NO: 4947 - DNA, 10 bp, Artificial Sequence
  Synthetic Sequence
ctttcacagt

SEQ ID NO: 4948 - DNA, 10 bp, Artificial Sequence
  Synthetic Sequence
aaactctcct

SEQ ID NO: 4949 - DNA, 10 bp, Artificial Sequence
  Synthetic Sequence
gtccaatgcc

SEQ ID NO: 4950 - DNA, 10 bp, Artificial Sequence
  Synthetic Sequence
ctaatgaaac

SEQ ID NO: 4951 - DNA, 10 bp, Artificial Sequence
  Synthetic Sequence
cagtaatagt

SEQ ID NO: 4952 - DNA, 10 bp, Artificial Sequence
  Synthetic Sequence
atttagcata

SEQ ID NO: 4953 - DNA, 10 bp, Artificial Sequence
  Synthetic Sequence
tggccgccta

SEQ ID NO: 4954 - DNA, 10 bp, Artificial Sequence
  Synthetic Sequence
ggcgacgaat

SEQ ID NO: 4955 - DNA, 10 bp, Artificial Sequence
  Synthetic Sequence
cagaacctgc

SEQ ID NO: 4956 - DNA, 10 bp, Artificial Sequence
  Synthetic Sequence
gcgttgtccc

SEQ ID NO: 4957 - DNA, 10 bp, Artificial Sequence
  Synthetic Sequence
tctcaacttt

SEQ ID NO: 4958 - DNA, 10 bp, Artificial Sequence
  Synthetic Sequence
tccggcaacc

SEQ ID NO: 4959 - DNA, 10 bp, Artificial Sequence
  Synthetic Sequence
cggcgtatcg

SEQ ID NO: 4960 - DNA, 10 bp, Artificial Sequence
  Synthetic Sequence
tgcatgccgg

SEQ ID NO: 4961 - DNA, 10 bp, Artificial Sequence
  Synthetic Sequence
ccagcaccat

SEQ ID NO: 4962 - DNA, 10 bp, Artificial Sequence
  Synthetic Sequence
tgcgagtacg

SEQ ID NO: 4963 - DNA, 10 bp, Artificial Sequence
  Synthetic Sequence
ggcggaggtt

SEQ ID NO: 4964 - DNA, 10 bp, Artificial Sequence
  Synthetic Sequence
tttgcggctg

SEQ ID NO: 4965 - DNA, 10 bp, Artificial Sequence
  Synthetic Sequence
gcgcagtttc

SEQ ID NO: 4966 - DNA, 10 bp, Artificial Sequence
  Synthetic Sequence
atggcagaaa

SEQ ID NO: 4967 - DNA, 10 bp, Artificial Sequence
  Synthetic Sequence
ttatgaaagt

SEQ ID NO: 4968 - DNA, 10 bp, Artificial Sequence
  Synthetic Sequence
agatgccttg

SEQ ID NO: 4969 - DNA, 10 bp, Artificial Sequence
  Synthetic Sequence
cgtgtcagat

SEQ ID NO: 4970 - DNA, 10 bp, Artificial Sequence
  Synthetic Sequence
gctccttaat

SEQ ID NO: 4971 - DNA, 10 bp, Artificial Sequence
  Synthetic Sequence
ttgggacaaa

SEQ ID NO: 4972 - DNA, 10 bp, Artificial Sequence
  Synthetic Sequence
gtgggtattt

SEQ ID NO: 4973 - DNA, 10 bp, Artificial Sequence
  Synthetic Sequence
ttggcttgac

SEQ ID NO: 4974 - DNA, 10 bp, Artificial Sequence
  Synthetic Sequence
aaagacgttt

SEQ ID NO: 4975 - DNA, 10 bp, Artificial Sequence
  Synthetic Sequence
aatacgagca

SEQ ID NO: 4976 - DNA, 10 bp, Artificial Sequence
  Synthetic Sequence
ttatcaccaa

SEQ ID NO: 4977 - DNA, 10 bp, Artificial Sequence
  Synthetic Sequence
agcgagtgag

SEQ ID NO: 4978 - DNA, 10 bp, Artificial Sequence
  Synthetic Sequence
cctttgaggt

SEQ ID NO: 4979 - DNA, 10 bp, Artificial Sequence
  Synthetic Sequence
tcaccactga

SEQ ID NO: 4980 - DNA, 10 bp, Artificial Sequence
  Synthetic Sequence
aaggaattcg

SEQ ID NO: 4981 - DNA, 10 bp, Artificial Sequence
  Synthetic Sequence
cgctcaccgt

SEQ ID NO: 4982 - DNA, 10 bp, Artificial Sequence
  Synthetic Sequence
gcctaagcgt

SEQ ID NO: 4983 - DNA, 10 bp, Artificial Sequence
  Synthetic Sequence
gtttcgtaaa

SEQ ID NO: 4984 - DNA, 10 bp, Artificial Sequence
  Synthetic Sequence
ccagttatac

SEQ ID NO: 4985 - DNA, 10 bp, Artificial Sequence
  Synthetic Sequence
tattctactt

SEQ ID NO: 4986 - DNA, 10 bp, Artificial Sequence
  Synthetic Sequence
ggccatgggt

SEQ ID NO: 4987 - DNA, 10 bp, Artificial Sequence
  Synthetic Sequence
ctgaactcaa

SEQ ID NO: 4988 - DNA, 10 bp, Artificial Sequence
  Synthetic Sequence
ctatacggag

SEQ ID NO: 4989 - DNA, 10 bp, Artificial Sequence
  Synthetic Sequence
cttggacgtg

SEQ ID NO: 4990 - DNA, 10 bp, Artificial Sequence
  Synthetic Sequence
tacctagcac

SEQ ID NO: 4991 - DNA, 10 bp, Artificial Sequence
  Synthetic Sequence
catgtcggag

SEQ ID NO: 4992 - DNA, 10 bp, Artificial Sequence
  Synthetic Sequence
tttagggcat

SEQ ID NO: 4993 - DNA, 10 bp, Artificial Sequence
  Synthetic Sequence
ggttcactaa

SEQ ID NO: 4994 - DNA, 10 bp, Artificial Sequence
  Synthetic Sequence
acatagtcgt

SEQ ID NO: 4995 - DNA, 10 bp, Artificial Sequence
  Synthetic Sequence
tcataatcct

SEQ ID NO: 4996 - DNA, 10 bp, Artificial Sequence
  Synthetic Sequence
cttgcgtatc

SEQ ID NO: 4997 - DNA, 10 bp, Artificial Sequence
  Synthetic Sequence
atatacccag

SEQ ID NO: 4998 - DNA, 10 bp, Artificial Sequence
  Synthetic Sequence
acttaggacc

SEQ ID NO: 4999 - DNA, 10 bp, Artificial Sequence
  Synthetic Sequence
agggctggaa

SEQ ID NO: 5000 - DNA, 10 bp, Artificial Sequence
  Synthetic Sequence
gccttcaagg

SEQ ID NO: 5001 - DNA, 10 bp, Artificial Sequence
  Synthetic Sequence
ggtgccaaag

SEQ ID NO: 5002 - DNA, 10 bp, Artificial Sequence
  Synthetic Sequence
ggctaaccga

SEQ ID NO: 5003 - DNA, 10 bp, Artificial Sequence
  Synthetic Sequence
atagggtatc

SEQ ID NO: 5004 - DNA, 10 bp, Artificial Sequence
  Synthetic Sequence
gttgaccgag

SEQ ID NO: 5005 - DNA, 10 bp, Artificial Sequence
  Synthetic Sequence
caaggaagac

SEQ ID NO: 5006 - DNA, 10 bp, Artificial Sequence
  Synthetic Sequence
tgactccgac

SEQ ID NO: 5007 - DNA, 10 bp, Artificial Sequence
  Synthetic Sequence
aatcattcac

SEQ ID NO: 5008 - DNA, 10 bp, Artificial Sequence
  Synthetic Sequence
ctatgggtgg

SEQ ID NO: 5009 - DNA, 10 bp, Artificial Sequence
  Synthetic Sequence
ataggacatg

SEQ ID NO: 5010 - DNA, 10 bp, Artificial Sequence
  Synthetic Sequence
cgacaggtaa

SEQ ID NO: 5011 - DNA, 10 bp, Artificial Sequence
  Synthetic Sequence
aaattcacag

SEQ ID NO: 5012 - DNA, 10 bp, Artificial Sequence
  Synthetic Sequence
aggtgcgagc

SEQ ID NO: 5013 - DNA, 10 bp, Artificial Sequence
  Synthetic Sequence
tagtccacat

SEQ ID NO: 5014 - DNA, 10 bp, Artificial Sequence
  Synthetic Sequence
aattagagtc

SEQ ID NO: 5015 - DNA, 10 bp, Artificial Sequence
  Synthetic Sequence
gaaatgactc

SEQ ID NO: 5016 - DNA, 10 bp, Artificial Sequence
  Synthetic Sequence
ggttcgcgct

SEQ ID NO: 5017 - DNA, 10 bp, Artificial Sequence
  Synthetic Sequence
agatgcacat

SEQ ID NO: 5018 - DNA, 10 bp, Artificial Sequence
  Synthetic Sequence
ttagtgtcct

SEQ ID NO: 5019 - DNA, 10 bp, Artificial Sequence
  Synthetic Sequence
gaccgcccat

SEQ ID NO: 5020 - DNA, 10 bp, Artificial Sequence
  Synthetic Sequence
acaggtgagc

SEQ ID NO: 5021 - DNA, 10 bp, Artificial Sequence
  Synthetic Sequence
cctctcgagg

SEQ ID NO: 5022 - DNA, 10 bp, Artificial Sequence
  Synthetic Sequence
aactctgaat

SEQ ID NO: 5023 - DNA, 10 bp, Artificial Sequence
  Synthetic Sequence
agttgtgact

SEQ ID NO: 5024 - DNA, 10 bp, Artificial Sequence
  Synthetic Sequence
acgtcagggc

SEQ ID NO: 5025 - DNA, 10 bp, Artificial Sequence
  Synthetic Sequence
gcaagctggc

SEQ ID NO: 5026 - DNA, 10 bp, Artificial Sequence
  Synthetic Sequence
gacccgtatc

SEQ ID NO: 5027 - DNA, 10 bp, Artificial Sequence
  Synthetic Sequence
acgccctgct

SEQ ID NO: 5028 - DNA, 10 bp, Artificial Sequence
  Synthetic Sequence
caacgagatt

SEQ ID NO: 5029 - DNA, 10 bp, Artificial Sequence
  Synthetic Sequence
cgcgcggatt

SEQ ID NO: 5030 - DNA, 10 bp, Artificial Sequence
  Synthetic Sequence
acgtgacagc

SEQ ID NO: 5031 - DNA, 10 bp, Artificial Sequence
  Synthetic Sequence
aattccctta

SEQ ID NO: 5032 - DNA, 10 bp, Artificial Sequence
  Synthetic Sequence
gttatgcgca

SEQ ID NO: 5033 - DNA, 10 bp, Artificial Sequence
  Synthetic Sequence
aggaattaat

SEQ ID NO: 5034 - DNA, 10 bp, Artificial Sequence
  Synthetic Sequence
taaccgatct

SEQ ID NO: 5035 - DNA, 10 bp, Artificial Sequence
  Synthetic Sequence
aacgtaaccg

SEQ ID NO: 5036 - DNA, 10 bp, Artificial Sequence
  Synthetic Sequence
tgcggatggg

SEQ ID NO: 5037 - DNA, 10 bp, Artificial Sequence
  Synthetic Sequence
tatacatgga

SEQ ID NO: 5038 - DNA, 10 bp, Artificial Sequence
  Synthetic Sequence
gtttccgcat

SEQ ID NO: 5039 - DNA, 10 bp, Artificial Sequence
  Synthetic Sequence
gggtctatct

SEQ ID NO: 5040 - DNA, 10 bp, Artificial Sequence
  Synthetic Sequence
tctgccgtca

SEQ ID NO: 5041 - DNA, 10 bp, Artificial Sequence
  Synthetic Sequence
ggacgtagct

SEQ ID NO: 5042 - DNA, 10 bp, Artificial Sequence
  Synthetic Sequence
aggatacaac

SEQ ID NO: 5043 - DNA, 10 bp, Artificial Sequence
  Synthetic Sequence
ggaagcgtaa

SEQ ID NO: 5044 - DNA, 10 bp, Artificial Sequence
  Synthetic Sequence
gttatggctg

SEQ ID NO: 5045 - DNA, 10 bp, Artificial Sequence
  Synthetic Sequence
gacattcgag

SEQ ID NO: 5046 - DNA, 10 bp, Artificial Sequence
  Synthetic Sequence
agccacggat

SEQ ID NO: 5047 - DNA, 10 bp, Artificial Sequence
  Synthetic Sequence
tcatcattat

SEQ ID NO: 5048 - DNA, 10 bp, Artificial Sequence
  Synthetic Sequence
tggctcttcc

SEQ ID NO: 5049 - DNA, 10 bp, Artificial Sequence
  Synthetic Sequence
aaactaaact

SEQ ID NO: 5050 - DNA, 10 bp, Artificial Sequence
  Synthetic Sequence
ttaacaactc

SEQ ID NO: 5051 - DNA, 10 bp, Artificial Sequence
  Synthetic Sequence
gttctccgcg

SEQ ID NO: 5052 - DNA, 10 bp, Artificial Sequence
  Synthetic Sequence
gactttgagt

SEQ ID NO: 5053 - DNA, 10 bp, Artificial Sequence
  Synthetic Sequence
ccgacatcct

SEQ ID NO: 5054 - DNA, 10 bp, Artificial Sequence
  Synthetic Sequence
ggacctctat

SEQ ID NO: 5055 - DNA, 10 bp, Artificial Sequence
  Synthetic Sequence
tctcggcaaa

SEQ ID NO: 5056 - DNA, 10 bp, Artificial Sequence
  Synthetic Sequence
gatgcgttat

SEQ ID NO: 5057 - DNA, 10 bp, Artificial Sequence
  Synthetic Sequence
gttcccgtta

SEQ ID NO: 5058 - DNA, 10 bp, Artificial Sequence
  Synthetic Sequence
aataaggtcc

SEQ ID NO: 5059 - DNA, 10 bp, Artificial Sequence
  Synthetic Sequence
tatgtcgacc

SEQ ID NO: 5060 - DNA, 10 bp, Artificial Sequence
  Synthetic Sequence
ctggcctgta

SEQ ID NO: 5061 - DNA, 10 bp, Artificial Sequence
  Synthetic Sequence
agtacaggct

SEQ ID NO: 5062 - DNA, 10 bp, Artificial Sequence
  Synthetic Sequence
tcgcttgtcc

SEQ ID NO: 5063 - DNA, 10 bp, Artificial Sequence
  Synthetic Sequence
cagtgtctgc

SEQ ID NO: 5064 - DNA, 10 bp, Artificial Sequence
  Synthetic Sequence
aactaattgc

SEQ ID NO: 5065 - DNA, 10 bp, Artificial Sequence
  Synthetic Sequence
ctagtaattg

SEQ ID NO: 5066 - DNA, 10 bp, Artificial Sequence
  Synthetic Sequence
gttacagacg

SEQ ID NO: 5067 - DNA, 10 bp, Artificial Sequence
  Synthetic Sequence
gaacactgca

SEQ ID NO: 5068 - DNA, 10 bp, Artificial Sequence
  Synthetic Sequence
aaggcatggt

SEQ ID NO: 5069 - DNA, 10 bp, Artificial Sequence
  Synthetic Sequence
tgtcgcatcc

SEQ ID NO: 5070 - DNA, 10 bp, Artificial Sequence
  Synthetic Sequence
aaatgccggc

SEQ ID NO: 5071 - DNA, 10 bp, Artificial Sequence
  Synthetic Sequence
ggacaagttg

SEQ ID NO: 5072 - DNA, 10 bp, Artificial Sequence
  Synthetic Sequence
atcttggccc

SEQ ID NO: 5073 - DNA, 10 bp, Artificial Sequence
  Synthetic Sequence
gatggctacc

SEQ ID NO: 5074 - DNA, 10 bp, Artificial Sequence
  Synthetic Sequence
tgacggcgtc

SEQ ID NO: 5075 - DNA, 10 bp, Artificial Sequence
  Synthetic Sequence
tcctcggctg

SEQ ID NO: 5076 - DNA, 10 bp, Artificial Sequence
  Synthetic Sequence
cgcggctaaa

SEQ ID NO: 5077 - DNA, 10 bp, Artificial Sequence
  Synthetic Sequence
agctgacgaa

SEQ ID NO: 5078 - DNA, 10 bp, Artificial Sequence
  Synthetic Sequence
gtgggatcta

SEQ ID NO: 5079 - DNA, 10 bp, Artificial Sequence
  Synthetic Sequence
tagcgggact

SEQ ID NO: 5080 - DNA, 10 bp, Artificial Sequence
  Synthetic Sequence
cgttgagtat

SEQ ID NO: 5081 - DNA, 10 bp, Artificial Sequence
  Synthetic Sequence
agtatgtcca

SEQ ID NO: 5082 - DNA, 10 bp, Artificial Sequence
  Synthetic Sequence
tgttgctgag

SEQ ID NO: 5083 - DNA, 10 bp, Artificial Sequence
  Synthetic Sequence
ggacatcgac

SEQ ID NO: 5084 - DNA, 10 bp, Artificial Sequence
  Synthetic Sequence
gagagcttat

SEQ ID NO: 5085 - DNA, 10 bp, Artificial Sequence
  Synthetic Sequence
tttgagtctt

SEQ ID NO: 5086 - DNA, 10 bp, Artificial Sequence
  Synthetic Sequence
tcatgcctta

SEQ ID NO: 5087 - DNA, 10 bp, Artificial Sequence
  Synthetic Sequence
taaggcacgt

SEQ ID NO: 5088 - DNA, 10 bp, Artificial Sequence
  Synthetic Sequence
agagtagcca

SEQ ID NO: 5089 - DNA, 10 bp, Artificial Sequence
  Synthetic Sequence
ttgtattaac

SEQ ID NO: 5090 - DNA, 10 bp, Artificial Sequence
  Synthetic Sequence
actttacaga

SEQ ID NO: 5091 - DNA, 10 bp, Artificial Sequence
  Synthetic Sequence
ttgttatgta

SEQ ID NO: 5092 - DNA, 10 bp, Artificial Sequence
  Synthetic Sequence
ctggttaaca

SEQ ID NO: 5093 - DNA, 10 bp, Artificial Sequence
  Synthetic Sequence
gcaggagaca

SEQ ID NO: 5094 - DNA, 10 bp, Artificial Sequence
  Synthetic Sequence
aggacaggag

SEQ ID NO: 5095 - DNA, 10 bp, Artificial Sequence
  Synthetic Sequence
gggtccaagg

SEQ ID NO: 5096 - DNA, 10 bp, Artificial Sequence
  Synthetic Sequence
cagccatgcg

SEQ ID NO: 5097 - DNA, 10 bp, Artificial Sequence
  Synthetic Sequence
ttattcgttt

SEQ ID NO: 5098 - DNA, 10 bp, Artificial Sequence
  Synthetic Sequence
gagcatacgc

SEQ ID NO: 5099 - DNA, 10 bp, Artificial Sequence
  Synthetic Sequence
accctgcagt

SEQ ID NO: 5100 - DNA, 10 bp, Artificial Sequence
  Synthetic Sequence
ctggcacgac

SEQ ID NO: 5101 - DNA, 10 bp, Artificial Sequence
  Synthetic Sequence
gatcggcctc

SEQ ID NO: 5102 - DNA, 10 bp, Artificial Sequence
  Synthetic Sequence
gcgactacag

SEQ ID NO: 5103 - DNA, 10 bp, Artificial Sequence
  Synthetic Sequence
ttaatcgtaa

SEQ ID NO: 5104 - DNA, 10 bp, Artificial Sequence
  Synthetic Sequence
ggtgatctcg

SEQ ID NO: 5105 - DNA, 10 bp, Artificial Sequence
  Synthetic Sequence
gtggcttaag

SEQ ID NO: 5106 - DNA, 10 bp, Artificial Sequence
  Synthetic Sequence
acggtgcgtc

SEQ ID NO: 5107 - DNA, 10 bp, Artificial Sequence
  Synthetic Sequence
tcttacttgg

SEQ ID NO: 5108 - DNA, 10 bp, Artificial Sequence
  Synthetic Sequence
tgggagccaa

SEQ ID NO: 5109 - DNA, 10 bp, Artificial Sequence
  Synthetic Sequence
agattcagac

SEQ ID NO: 5110 - DNA, 10 bp, Artificial Sequence
  Synthetic Sequence
atcttaactc

SEQ ID NO: 5111 - DNA, 10 bp, Artificial Sequence
  Synthetic Sequence
caggagtaaa

SEQ ID NO: 5112 - DNA, 10 bp, Artificial Sequence
  Synthetic Sequence
gacccgagac

SEQ ID NO: 5113 - DNA, 10 bp, Artificial Sequence
  Synthetic Sequence
tccgctcttt

SEQ ID NO: 5114 - DNA, 10 bp, Artificial Sequence
  Synthetic Sequence
agcgtagttt

SEQ ID NO: 5115 - DNA, 10 bp, Artificial Sequence
  Synthetic Sequence
atgatattga

SEQ ID NO: 5116 - DNA, 10 bp, Artificial Sequence
  Synthetic Sequence
tgctgccgtc

SEQ ID NO: 5117 - DNA, 10 bp, Artificial Sequence
  Synthetic Sequence
gaacgccaac

SEQ ID NO: 5118 - DNA, 10 bp, Artificial Sequence
  Synthetic Sequence
cagtgtggtt

SEQ ID NO: 5119 - DNA, 10 bp, Artificial Sequence
  Synthetic Sequence
tagtttgtat

SEQ ID NO: 5120 - DNA, 10 bp, Artificial Sequence
  Synthetic Sequence
gcgatcgcag

SEQ ID NO: 5121 - DNA, 10 bp, Artificial Sequence
  Synthetic Sequence
cagtcgatca

SEQ ID NO: 5122 - DNA, 10 bp, Artificial Sequence
  Synthetic Sequence
taaccaccag

SEQ ID NO: 5123 - DNA, 10 bp, Artificial Sequence
  Synthetic Sequence
aggtaattga

SEQ ID NO: 5124 - DNA, 10 bp, Artificial Sequence
  Synthetic Sequence
cctagctcag

SEQ ID NO: 5125 - DNA, 10 bp, Artificial Sequence
  Synthetic Sequence
tcgataatgc

SEQ ID NO: 5126 - DNA, 10 bp, Artificial Sequence
  Synthetic Sequence
ctctttagag

SEQ ID NO: 5127 - DNA, 10 bp, Artificial Sequence
  Synthetic Sequence
gtcacctgcc

SEQ ID NO: 5128 - DNA, 10 bp, Artificial Sequence
  Synthetic Sequence
gtcgtcgtat

SEQ ID NO: 5129 - DNA, 10 bp, Artificial Sequence
  Synthetic Sequence
gatcaatcta

SEQ ID NO: 5130 - DNA, 10 bp, Artificial Sequence
  Synthetic Sequence
tagactggac

SEQ ID NO: 5131 - DNA, 10 bp, Artificial Sequence
  Synthetic Sequence
taagtcaggg

SEQ ID NO: 5132 - DNA, 10 bp, Artificial Sequence
  Synthetic Sequence
tgctttgggt

SEQ ID NO: 5133 - DNA, 10 bp, Artificial Sequence
  Synthetic Sequence
ctcttacgtc

SEQ ID NO: 5134 - DNA, 10 bp, Artificial Sequence
  Synthetic Sequence
cataaagagc

SEQ ID NO: 5135 - DNA, 10 bp, Artificial Sequence
  Synthetic Sequence
gatgtacaac

SEQ ID NO: 5136 - DNA, 10 bp, Artificial Sequence
  Synthetic Sequence
ccgggtgtta

SEQ ID NO: 5137 - DNA, 10 bp, Artificial Sequence
  Synthetic Sequence
aggccgaaat

SEQ ID NO: 5138 - DNA, 10 bp, Artificial Sequence
  Synthetic Sequence
tcactcagga

SEQ ID NO: 5139 - DNA, 10 bp, Artificial Sequence
  Synthetic Sequence
cagaccgaac

SEQ ID NO: 5140 - DNA, 10 bp, Artificial Sequence
  Synthetic Sequence
gttgcaagac

SEQ ID NO: 5141 - DNA, 10 bp, Artificial Sequence
  Synthetic Sequence
ttaaatcgca

SEQ ID NO: 5142 - DNA, 10 bp, Artificial Sequence
  Synthetic Sequence
gaaacgtagc

SEQ ID NO: 5143 - DNA, 10 bp, Artificial Sequence
  Synthetic Sequence
cccagcacgt

SEQ ID NO: 5144 - DNA, 10 bp, Artificial Sequence
  Synthetic Sequence
gacgcttacc

SEQ ID NO: 5145 - DNA, 10 bp, Artificial Sequence
  Synthetic Sequence
cactcattct

SEQ ID NO: 5146 - DNA, 10 bp, Artificial Sequence
  Synthetic Sequence
actctgtgtt

SEQ ID NO: 5147 - DNA, 10 bp, Artificial Sequence
  Synthetic Sequence
cttctaggtt

SEQ ID NO: 5148 - DNA, 10 bp, Artificial Sequence
  Synthetic Sequence
cgctccaagc

SEQ ID NO: 5149 - DNA, 10 bp, Artificial Sequence
  Synthetic Sequence
aataggccgg

SEQ ID NO: 5150 - DNA, 10 bp, Artificial Sequence
  Synthetic Sequence
tccacactta

SEQ ID NO: 5151 - DNA, 10 bp, Artificial Sequence
  Synthetic Sequence
atccctttga

SEQ ID NO: 5152 - DNA, 10 bp, Artificial Sequence
  Synthetic Sequence
cgcttcccga

SEQ ID NO: 5153 - DNA, 10 bp, Artificial Sequence
  Synthetic Sequence
tgtgctgtag

SEQ ID NO: 5154 - DNA, 10 bp, Artificial Sequence
  Synthetic Sequence
ttcggtcgcg

SEQ ID NO: 5155 - DNA, 10 bp, Artificial Sequence
  Synthetic Sequence
gggtatccag

SEQ ID NO: 5156 - DNA, 10 bp, Artificial Sequence
  Synthetic Sequence
gcgcttggtt

SEQ ID NO: 5157 - DNA, 10 bp, Artificial Sequence
  Synthetic Sequence
ggtctgctca

SEQ ID NO: 5158 - DNA, 10 bp, Artificial Sequence
  Synthetic Sequence
agtacatata

SEQ ID NO: 5159 - DNA, 10 bp, Artificial Sequence
  Synthetic Sequence
tagacatacc

SEQ ID NO: 5160 - DNA, 10 bp, Artificial Sequence
  Synthetic Sequence
cccattattg

SEQ ID NO: 5161 - DNA, 10 bp, Artificial Sequence
  Synthetic Sequence
ctagttcgca

SEQ ID NO: 5162 - DNA, 10 bp, Artificial Sequence
  Synthetic Sequence
gcgtggagaa

SEQ ID NO: 5163 - DNA, 10 bp, Artificial Sequence
  Synthetic Sequence
gacgggttcg

SEQ ID NO: 5164 - DNA, 10 bp, Artificial Sequence
  Synthetic Sequence
tggtacgaat

SEQ ID NO: 5165 - DNA, 10 bp, Artificial Sequence
  Synthetic Sequence
atgcgtgttc

SEQ ID NO: 5166 - DNA, 10 bp, Artificial Sequence
  Synthetic Sequence
ataaagagca

SEQ ID NO: 5167 - DNA, 10 bp, Artificial Sequence
  Synthetic Sequence
tgcattagca

SEQ ID NO: 5168 - DNA, 10 bp, Artificial Sequence
  Synthetic Sequence
tgatgttgtg

SEQ ID NO: 5169 - DNA, 10 bp, Artificial Sequence
  Synthetic Sequence
gcggttaata

SEQ ID NO: 5170 - DNA, 10 bp, Artificial Sequence
  Synthetic Sequence
cctctatacg

SEQ ID NO: 5171 - DNA, 10 bp, Artificial Sequence
  Synthetic Sequence
gaaagactta

SEQ ID NO: 5172 - DNA, 10 bp, Artificial Sequence
  Synthetic Sequence
tcgtcagctt

SEQ ID NO: 5173 - DNA, 10 bp, Artificial Sequence
  Synthetic Sequence
tagccagtgc

SEQ ID NO: 5174 - DNA, 10 bp, Artificial Sequence
  Synthetic Sequence
tcgatcggta

SEQ ID NO: 5175 - DNA, 10 bp, Artificial Sequence
  Synthetic Sequence
tcaaggacaa

SEQ ID NO: 5176 - DNA, 10 bp, Artificial Sequence
  Synthetic Sequence
atgaagattt

SEQ ID NO: 5177 - DNA, 10 bp, Artificial Sequence
  Synthetic Sequence
gagatagaca

SEQ ID NO: 5178 - DNA, 10 bp, Artificial Sequence
  Synthetic Sequence
gttatcttcg

SEQ ID NO: 5179 - DNA, 10 bp, Artificial Sequence
  Synthetic Sequence
atccaggcca

SEQ ID NO: 5180 - DNA, 10 bp, Artificial Sequence
  Synthetic Sequence
agtggagata

SEQ ID NO: 5181 - DNA, 10 bp, Artificial Sequence
  Synthetic Sequence
tagggaatca

SEQ ID NO: 5182 - DNA, 10 bp, Artificial Sequence
  Synthetic Sequence
atcggcaatt

SEQ ID NO: 5183 - DNA, 10 bp, Artificial Sequence
  Synthetic Sequence
ttagcagggc

SEQ ID NO: 5184 - DNA, 10 bp, Artificial Sequence
  Synthetic Sequence
cggcgtaggt

SEQ ID NO: 5185 - DNA, 10 bp, Artificial Sequence
  Synthetic Sequence
aacgtattcc

SEQ ID NO: 5186 - DNA, 10 bp, Artificial Sequence
  Synthetic Sequence
gtaacacagc

SEQ ID NO: 5187 - DNA, 10 bp, Artificial Sequence
  Synthetic Sequence
ggagacctgg

SEQ ID NO: 5188 - DNA, 10 bp, Artificial Sequence
  Synthetic Sequence
taatacccaa

SEQ ID NO: 5189 - DNA, 10 bp, Artificial Sequence
  Synthetic Sequence
gtttgtgtcg

SEQ ID NO: 5190 - DNA, 10 bp, Artificial Sequence
  Synthetic Sequence
acacagactt

SEQ ID NO: 5191 - DNA, 10 bp, Artificial Sequence
  Synthetic Sequence
actaacggga

SEQ ID NO: 5192 - DNA, 10 bp, Artificial Sequence
  Synthetic Sequence
accttcgcta

SEQ ID NO: 5193 - DNA, 10 bp, Artificial Sequence
  Synthetic Sequence
ctgcggatct

SEQ ID NO: 5194 - DNA, 10 bp, Artificial Sequence
  Synthetic Sequence
gctaaccggg

SEQ ID NO: 5195 - DNA, 10 bp, Artificial Sequence
  Synthetic Sequence
tgctattata

SEQ ID NO: 5196 - DNA, 10 bp, Artificial Sequence
  Synthetic Sequence
ctaactccct

SEQ ID NO: 5197 - DNA, 10 bp, Artificial Sequence
  Synthetic Sequence
aatcctttat

SEQ ID NO: 5198 - DNA, 10 bp, Artificial Sequence
  Synthetic Sequence
cagttaaggg

SEQ ID NO: 5199 - DNA, 10 bp, Artificial Sequence
  Synthetic Sequence
tcactaagcg

SEQ ID NO: 5200 - DNA, 10 bp, Artificial Sequence
  Synthetic Sequence
ctagccacag

SEQ ID NO: 5201 - DNA, 10 bp, Artificial Sequence
  Synthetic Sequence
ggtagactca

SEQ ID NO: 5202 - DNA, 10 bp, Artificial Sequence
  Synthetic Sequence
agtatgtggt

SEQ ID NO: 5203 - DNA, 10 bp, Artificial Sequence
  Synthetic Sequence
aggtagataa

SEQ ID NO: 5204 - DNA, 10 bp, Artificial Sequence
  Synthetic Sequence
cgaacccgtc

SEQ ID NO: 5205 - DNA, 10 bp, Artificial Sequence
  Synthetic Sequence
cgctaacggc

SEQ ID NO: 5206 - DNA, 10 bp, Artificial Sequence
  Synthetic Sequence
cggcggtgaa

SEQ ID NO: 5207 - DNA, 10 bp, Artificial Sequence
  Synthetic Sequence
gcaagcccaa

SEQ ID NO: 5208 - DNA, 10 bp, Artificial Sequence
  Synthetic Sequence
ctcacctatt

SEQ ID NO: 5209 - DNA, 10 bp, Artificial Sequence
  Synthetic Sequence
tatcgattga

SEQ ID NO: 5210 - DNA, 10 bp, Artificial Sequence
  Synthetic Sequence
aacggcctgt

SEQ ID NO: 5211 - DNA, 10 bp, Artificial Sequence
  Synthetic Sequence
gggctggcta

SEQ ID NO: 5212 - DNA, 10 bp, Artificial Sequence
  Synthetic Sequence
gtaatccttt

SEQ ID NO: 5213 - DNA, 10 bp, Artificial Sequence
  Synthetic Sequence
agctgtaagg

SEQ ID NO: 5214 - DNA, 10 bp, Artificial Sequence
  Synthetic Sequence
aggacgacgc

SEQ ID NO: 5215 - DNA, 10 bp, Artificial Sequence
  Synthetic Sequence
gagcggttgt

SEQ ID NO: 5216 - DNA, 10 bp, Artificial Sequence
  Synthetic Sequence
actccgacgc

SEQ ID NO: 5217 - DNA, 10 bp, Artificial Sequence
  Synthetic Sequence
ttgtgagtga

SEQ ID NO: 5218 - DNA, 10 bp, Artificial Sequence
  Synthetic Sequence
caataaggac

SEQ ID NO: 5219 - DNA, 10 bp, Artificial Sequence
  Synthetic Sequence
agtacctgaa

SEQ ID NO: 5220 - DNA, 10 bp, Artificial Sequence
  Synthetic Sequence
ctgcgttact

SEQ ID NO: 5221 - DNA, 10 bp, Artificial Sequence
  Synthetic Sequence
tgcggcttac

SEQ ID NO: 5222 - DNA, 10 bp, Artificial Sequence
  Synthetic Sequence
tgactgtgca

SEQ ID NO: 5223 - DNA, 10 bp, Artificial Sequence
  Synthetic Sequence
cgggtcgtga

SEQ ID NO: 5224 - DNA, 10 bp, Artificial Sequence
  Synthetic Sequence
acactttacg

SEQ ID NO: 5225 - DNA, 10 bp, Artificial Sequence
  Synthetic Sequence
agtcccaagt

SEQ ID NO: 5226 - DNA, 10 bp, Artificial Sequence
  Synthetic Sequence
ggagaacaaa

SEQ ID NO: 5227 - DNA, 10 bp, Artificial Sequence
  Synthetic Sequence
agccgtaacc

SEQ ID NO: 5228 - DNA, 10 bp, Artificial Sequence
  Synthetic Sequence
tctggccacg

SEQ ID NO: 5229 - DNA, 10 bp, Artificial Sequence
  Synthetic Sequence
tggccagcat

SEQ ID NO: 5230 - DNA, 10 bp, Artificial Sequence
  Synthetic Sequence
atcaagcgat

SEQ ID NO: 5231 - DNA, 10 bp, Artificial Sequence
  Synthetic Sequence
aactcagcgg

SEQ ID NO: 5232 - DNA, 10 bp, Artificial Sequence
  Synthetic Sequence
ggttgtaagt

SEQ ID NO: 5233 - DNA, 10 bp, Artificial Sequence
  Synthetic Sequence
cagactacac

SEQ ID NO: 5234 - DNA, 10 bp, Artificial Sequence
  Synthetic Sequence
cactgagaat

SEQ ID NO: 5235 - DNA, 10 bp, Artificial Sequence
  Synthetic Sequence
tttgactaag

SEQ ID NO: 5236 - DNA, 10 bp, Artificial Sequence
  Synthetic Sequence
gcagacttcg

SEQ ID NO: 5237 - DNA, 10 bp, Artificial Sequence
  Synthetic Sequence
ctagttgtct

SEQ ID NO: 5238 - DNA, 10 bp, Artificial Sequence
  Synthetic Sequence
gctatccaag

SEQ ID NO: 5239 - DNA, 10 bp, Artificial Sequence
  Synthetic Sequence
tcttctctcc

SEQ ID NO: 5240 - DNA, 10 bp, Artificial Sequence
  Synthetic Sequence
ggaaggcagg

SEQ ID NO: 5241 - DNA, 10 bp, Artificial Sequence
  Synthetic Sequence
ggttcatcta

SEQ ID NO: 5242 - DNA, 10 bp, Artificial Sequence
  Synthetic Sequence
ggatgatagc

SEQ ID NO: 5243 - DNA, 10 bp, Artificial Sequence
  Synthetic Sequence
ccttcgaacc

SEQ ID NO: 5244 - DNA, 10 bp, Artificial Sequence
  Synthetic Sequence
gatgttagct

SEQ ID NO: 5245 - DNA, 10 bp, Artificial Sequence
  Synthetic Sequence
gggacaaacc

SEQ ID NO: 5246 - DNA, 10 bp, Artificial Sequence
  Synthetic Sequence
ctcgcgcaaa

SEQ ID NO: 5247 - DNA, 10 bp, Artificial Sequence
  Synthetic Sequence
caaacgcatg

SEQ ID NO: 5248 - DNA, 10 bp, Artificial Sequence
  Synthetic Sequence
tgaggaagcc

SEQ ID NO: 5249 - DNA, 10 bp, Artificial Sequence
  Synthetic Sequence
tcttggtgat

SEQ ID NO: 5250 - DNA, 10 bp, Artificial Sequence
  Synthetic Sequence
cttaacccac

SEQ ID NO: 5251 - DNA, 10 bp, Artificial Sequence
  Synthetic Sequence
tcccgattta

SEQ ID NO: 5252 - DNA, 10 bp, Artificial Sequence
  Synthetic Sequence
gagcaaatca

SEQ ID NO: 5253 - DNA, 10 bp, Artificial Sequence
  Synthetic Sequence
tcagctgtaa

SEQ ID NO: 5254 - DNA, 10 bp, Artificial Sequence
  Synthetic Sequence
tcgcgggttt

SEQ ID NO: 5255 - DNA, 10 bp, Artificial Sequence
  Synthetic Sequence
tcggacacag

SEQ ID NO: 5256 - DNA, 10 bp, Artificial Sequence
  Synthetic Sequence
gaactccgtc

SEQ ID NO: 5257 - DNA, 10 bp, Artificial Sequence
  Synthetic Sequence
accatattgg

SEQ ID NO: 5258 - DNA, 10 bp, Artificial Sequence
  Synthetic Sequence
tttatgtaga

SEQ ID NO: 5259 - DNA, 10 bp, Artificial Sequence
  Synthetic Sequence
ctacgcacga

SEQ ID NO: 5260 - DNA, 10 bp, Artificial Sequence
  Synthetic Sequence
gatcggagaa

SEQ ID NO: 5261 - DNA, 10 bp, Artificial Sequence
  Synthetic Sequence
tgacttaatg

SEQ ID NO: 5262 - DNA, 10 bp, Artificial Sequence
  Synthetic Sequence
cgttaggtta

SEQ ID NO: 5263 - DNA, 10 bp, Artificial Sequence
  Synthetic Sequence
tcaactaccc

SEQ ID NO: 5264 - DNA, 10 bp, Artificial Sequence
  Synthetic Sequence
agcgcaacag

SEQ ID NO: 5265 - DNA, 10 bp, Artificial Sequence
  Synthetic Sequence
cgtttacata

SEQ ID NO: 5266 - DNA, 10 bp, Artificial Sequence
  Synthetic Sequence
tccaacatca

SEQ ID NO: 5267 - DNA, 10 bp, Artificial Sequence
  Synthetic Sequence
gagagggtcc

SEQ ID NO: 5268 - DNA, 10 bp, Artificial Sequence
  Synthetic Sequence
ccgaaaccgc

SEQ ID NO: 5269 - DNA, 10 bp, Artificial Sequence
  Synthetic Sequence
tctctgaccc

SEQ ID NO: 5270 - DNA, 10 bp, Artificial Sequence
  Synthetic Sequence
ggtagggtgg

SEQ ID NO: 5271 - DNA, 10 bp, Artificial Sequence
  Synthetic Sequence
tgatacaata

SEQ ID NO: 5272 - DNA, 10 bp, Artificial Sequence
  Synthetic Sequence
attctattac

SEQ ID NO: 5273 - DNA, 10 bp, Artificial Sequence
  Synthetic Sequence
acacgaggtt

SEQ ID NO: 5274 - DNA, 10 bp, Artificial Sequence
  Synthetic Sequence
ggtatgaaag

SEQ ID NO: 5275 - DNA, 10 bp, Artificial Sequence
  Synthetic Sequence
ggctttgtat

SEQ ID NO: 5276 - DNA, 10 bp, Artificial Sequence
  Synthetic Sequence
acggagacct

SEQ ID NO: 5277 - DNA, 10 bp, Artificial Sequence
  Synthetic Sequence
ggatgcacgc

SEQ ID NO: 5278 - DNA, 10 bp, Artificial Sequence
  Synthetic Sequence
cgcgttatta

SEQ ID NO: 5279 - DNA, 10 bp, Artificial Sequence
  Synthetic Sequence
cctttggccg

SEQ ID NO: 5280 - DNA, 10 bp, Artificial Sequence
  Synthetic Sequence
gaggtatcat

SEQ ID NO: 5281 - DNA, 10 bp, Artificial Sequence
  Synthetic Sequence
cattcggaca

SEQ ID NO: 5282 - DNA, 10 bp, Artificial Sequence
  Synthetic Sequence
cgtaaccgga

SEQ ID NO: 5283 - DNA, 10 bp, Artificial Sequence
  Synthetic Sequence
gagggatagc

SEQ ID NO: 5284 - DNA, 10 bp, Artificial Sequence
  Synthetic Sequence
attatgttgg

SEQ ID NO: 5285 - DNA, 10 bp, Artificial Sequence
  Synthetic Sequence
gcttaacact

SEQ ID NO: 5286 - DNA, 10 bp, Artificial Sequence
  Synthetic Sequence
caactaacca

SEQ ID NO: 5287 - DNA, 10 bp, Artificial Sequence
  Synthetic Sequence
gtcgaagtgc

SEQ ID NO: 5288 - DNA, 10 bp, Artificial Sequence
  Synthetic Sequence
attaagacta

SEQ ID NO: 5289 - DNA, 10 bp, Artificial Sequence
  Synthetic Sequence
ccagtatatc

SEQ ID NO: 5290 - DNA, 10 bp, Artificial Sequence
  Synthetic Sequence
gcgatggcca

SEQ ID NO: 5291 - DNA, 10 bp, Artificial Sequence
  Synthetic Sequence
caactggtgt

SEQ ID NO: 5292 - DNA, 10 bp, Artificial Sequence
  Synthetic Sequence
cctgtcgtgc

SEQ ID NO: 5293 - DNA, 10 bp, Artificial Sequence
  Synthetic Sequence
tcgcatctta

SEQ ID NO: 5294 - DNA, 10 bp, Artificial Sequence
  Synthetic Sequence
gggcataatg

SEQ ID NO: 5295 - DNA, 10 bp, Artificial Sequence
  Synthetic Sequence
taagctcgat

SEQ ID NO: 5296 - DNA, 10 bp, Artificial Sequence
  Synthetic Sequence
tttgccggac

SEQ ID NO: 5297 - DNA, 10 bp, Artificial Sequence
  Synthetic Sequence
cctcacagga

SEQ ID NO: 5298 - DNA, 10 bp, Artificial Sequence
  Synthetic Sequence
cgaagaacca

SEQ ID NO: 5299 - DNA, 10 bp, Artificial Sequence
  Synthetic Sequence
ttaattaata

SEQ ID NO: 5300 - DNA, 10 bp, Artificial Sequence
  Synthetic Sequence
atcagaaact

SEQ ID NO: 5301 - DNA, 10 bp, Artificial Sequence
  Synthetic Sequence
ttctgcaatc

SEQ ID NO: 5302 - DNA, 10 bp, Artificial Sequence
  Synthetic Sequence
gtcaattaaa

SEQ ID NO: 5303 - DNA, 10 bp, Artificial Sequence
  Synthetic Sequence
tctaccgacg

SEQ ID NO: 5304 - DNA, 10 bp, Artificial Sequence
  Synthetic Sequence
aggctcaaga

SEQ ID NO: 5305 - DNA, 10 bp, Artificial Sequence
  Synthetic Sequence
gactggacaa

SEQ ID NO: 5306 - DNA, 10 bp, Artificial Sequence
  Synthetic Sequence
tactctgcga

SEQ ID NO: 5307 - DNA, 10 bp, Artificial Sequence
  Synthetic Sequence
ctttaactct

SEQ ID NO: 5308 - DNA, 10 bp, Artificial Sequence
  Synthetic Sequence
gtgcctgagc

SEQ ID NO: 5309 - DNA, 10 bp, Artificial Sequence
  Synthetic Sequence
gaagaattaa

SEQ ID NO: 5310 - DNA, 10 bp, Artificial Sequence
  Synthetic Sequence
ctcaggtctc

SEQ ID NO: 5311 - DNA, 10 bp, Artificial Sequence
  Synthetic Sequence
aggtgggtag

SEQ ID NO: 5312 - DNA, 10 bp, Artificial Sequence
  Synthetic Sequence
ttagagttca

SEQ ID NO: 5313 - DNA, 10 bp, Artificial Sequence
  Synthetic Sequence
agaggtatgt

SEQ ID NO: 5314 - DNA, 10 bp, Artificial Sequence
  Synthetic Sequence
gttattccct

SEQ ID NO: 5315 - DNA, 10 bp, Artificial Sequence
  Synthetic Sequence
aagtaagtct

SEQ ID NO: 5316 - DNA, 10 bp, Artificial Sequence
  Synthetic Sequence
aatctgcccg

SEQ ID NO: 5317 - DNA, 10 bp, Artificial Sequence
  Synthetic Sequence
ccatgcactg

SEQ ID NO: 5318 - DNA, 10 bp, Artificial Sequence
  Synthetic Sequence
tataagaaag

SEQ ID NO: 5319 - DNA, 10 bp, Artificial Sequence
  Synthetic Sequence
ttgtgtagcg

SEQ ID NO: 5320 - DNA, 10 bp, Artificial Sequence
  Synthetic Sequence
atatgttact

SEQ ID NO: 5321 - DNA, 10 bp, Artificial Sequence
  Synthetic Sequence
tcaaataact

SEQ ID NO: 5322 - DNA, 10 bp, Artificial Sequence
  Synthetic Sequence
gttcggaacg

SEQ ID NO: 5323 - DNA, 10 bp, Artificial Sequence
  Synthetic Sequence
cgcgtctacc

SEQ ID NO: 5324 - DNA, 10 bp, Artificial Sequence
  Synthetic Sequence
gagggtaagt

SEQ ID NO: 5325 - DNA, 10 bp, Artificial Sequence
  Synthetic Sequence
ccacggcaat

SEQ ID NO: 5326 - DNA, 10 bp, Artificial Sequence
  Synthetic Sequence
ggttagtcgt

SEQ ID NO: 5327 - DNA, 10 bp, Artificial Sequence
  Synthetic Sequence
gactagagcg

SEQ ID NO: 5328 - DNA, 10 bp, Artificial Sequence
  Synthetic Sequence
gaacggtgcg

SEQ ID NO: 5329 - DNA, 10 bp, Artificial Sequence
  Synthetic Sequence
gaatgtagca

SEQ ID NO: 5330 - DNA, 10 bp, Artificial Sequence
  Synthetic Sequence
ttgcacgcaa

SEQ ID NO: 5331 - DNA, 10 bp, Artificial Sequence
  Synthetic Sequence
agcttctgcg

SEQ ID NO: 5332 - DNA, 10 bp, Artificial Sequence
  Synthetic Sequence
cggaggctat

SEQ ID NO: 5333 - DNA, 10 bp, Artificial Sequence
  Synthetic Sequence
ttggtgccgt

SEQ ID NO: 5334 - DNA, 10 bp, Artificial Sequence
  Synthetic Sequence
tcgcgcattc

SEQ ID NO: 5335 - DNA, 10 bp, Artificial Sequence
  Synthetic Sequence
ttaagaaacc

SEQ ID NO: 5336 - DNA, 10 bp, Artificial Sequence
  Synthetic Sequence
ttacaagaca

SEQ ID NO: 5337 - DNA, 10 bp, Artificial Sequence
  Synthetic Sequence
cactttgaca

SEQ ID NO: 5338 - DNA, 10 bp, Artificial Sequence
  Synthetic Sequence
aagccgtgga

SEQ ID NO: 5339 - DNA, 10 bp, Artificial Sequence
  Synthetic Sequence
acgagacaat

SEQ ID NO: 5340 - DNA, 10 bp, Artificial Sequence
  Synthetic Sequence
gcaactgacc

SEQ ID NO: 5341 - DNA, 10 bp, Artificial Sequence
  Synthetic Sequence
tatggagcat

SEQ ID NO: 5342 - DNA, 10 bp, Artificial Sequence
  Synthetic Sequence
cgttagctat

SEQ ID NO: 5343 - DNA, 10 bp, Artificial Sequence
  Synthetic Sequence
agttcgtatt

SEQ ID NO: 5344 - DNA, 10 bp, Artificial Sequence
  Synthetic Sequence
tcatgggctc

SEQ ID NO: 5345 - DNA, 10 bp, Artificial Sequence
  Synthetic Sequence
cgttcgttcc

SEQ ID NO: 5346 - DNA, 10 bp, Artificial Sequence
  Synthetic Sequence
catgataaat

SEQ ID NO: 5347 - DNA, 10 bp, Artificial Sequence
  Synthetic Sequence
ctaggttgat

SEQ ID NO: 5348 - DNA, 10 bp, Artificial Sequence
  Synthetic Sequence
cggcctcgaa

SEQ ID NO: 5349 - DNA, 10 bp, Artificial Sequence
  Synthetic Sequence
agttacccat

SEQ ID NO: 5350 - DNA, 10 bp, Artificial Sequence
  Synthetic Sequence
ctgtgtcgcc

SEQ ID NO: 5351 - DNA, 10 bp, Artificial Sequence
  Synthetic Sequence
acgaggagct

SEQ ID NO: 5352 - DNA, 10 bp, Artificial Sequence
  Synthetic Sequence
gacccaccac

SEQ ID NO: 5353 - DNA, 10 bp, Artificial Sequence
  Synthetic Sequence
aaacttcacc

SEQ ID NO: 5354 - DNA, 10 bp, Artificial Sequence
  Synthetic Sequence
aggccctatt

SEQ ID NO: 5355 - DNA, 10 bp, Artificial Sequence
  Synthetic Sequence
gtggctctat

SEQ ID NO: 5356 - DNA, 10 bp, Artificial Sequence
  Synthetic Sequence
atgcataaat

SEQ ID NO: 5357 - DNA, 10 bp, Artificial Sequence
  Synthetic Sequence
tcttagagaa

SEQ ID NO: 5358 - DNA, 10 bp, Artificial Sequence
  Synthetic Sequence
cagtgaccaa

SEQ ID NO: 5359 - DNA, 10 bp, Artificial Sequence
  Synthetic Sequence
gcgaatcgct

SEQ ID NO: 5360 - DNA, 10 bp, Artificial Sequence
  Synthetic Sequence
gtgatcgacg

SEQ ID NO: 5361 - DNA, 10 bp, Artificial Sequence
  Synthetic Sequence
tactatatga

SEQ ID NO: 5362 - DNA, 10 bp, Artificial Sequence
  Synthetic Sequence
ggaatcgcta

SEQ ID NO: 5363 - DNA, 10 bp, Artificial Sequence
  Synthetic Sequence
ccataaggga

SEQ ID NO: 5364 - DNA, 10 bp, Artificial Sequence
  Synthetic Sequence
cgcctgtcgt

SEQ ID NO: 5365 - DNA, 10 bp, Artificial Sequence
  Synthetic Sequence
agctcgctca

SEQ ID NO: 5366 - DNA, 10 bp, Artificial Sequence
  Synthetic Sequence
gtctgtgaaa

SEQ ID NO: 5367 - DNA, 10 bp, Artificial Sequence
  Synthetic Sequence
ggccggtaaa

SEQ ID NO: 5368 - DNA, 10 bp, Artificial Sequence
  Synthetic Sequence
cgggtggcaa

SEQ ID NO: 5369 - DNA, 10 bp, Artificial Sequence
  Synthetic Sequence
gctcatctcc

SEQ ID NO: 5370 - DNA, 10 bp, Artificial Sequence
  Synthetic Sequence
tccatagtgt

SEQ ID NO: 5371 - DNA, 10 bp, Artificial Sequence
  Synthetic Sequence
ttgtactggg

SEQ ID NO: 5372 - DNA, 10 bp, Artificial Sequence
  Synthetic Sequence
aatttcgtat

SEQ ID NO: 5373 - DNA, 10 bp, Artificial Sequence
  Synthetic Sequence
tagttatccc

SEQ ID NO: 5374 - DNA, 10 bp, Artificial Sequence
  Synthetic Sequence
tatttgttta

SEQ ID NO: 5375 - DNA, 10 bp, Artificial Sequence
  Synthetic Sequence
tcagtgcagc

SEQ ID NO: 5376 - DNA, 10 bp, Artificial Sequence
  Synthetic Sequence
tacctcatgt

SEQ ID NO: 5377 - DNA, 10 bp, Artificial Sequence
  Synthetic Sequence
cgtggtacgt

SEQ ID NO: 5378 - DNA, 10 bp, Artificial Sequence
  Synthetic Sequence
ccacgtttaa

SEQ ID NO: 5379 - DNA, 10 bp, Artificial Sequence
  Synthetic Sequence
agcagtctgg

SEQ ID NO: 5380 - DNA, 10 bp, Artificial Sequence
  Synthetic Sequence
aaatgggtta

SEQ ID NO: 5381 - DNA, 10 bp, Artificial Sequence
  Synthetic Sequence
gttgtctttc

SEQ ID NO: 5382 - DNA, 10 bp, Artificial Sequence
  Synthetic Sequence
gagctgtcag

SEQ ID NO: 5383 - DNA, 10 bp, Artificial Sequence
  Synthetic Sequence
acatgcggcc

SEQ ID NO: 5384 - DNA, 10 bp, Artificial Sequence
  Synthetic Sequence
gccagaccat

SEQ ID NO: 5385 - DNA, 10 bp, Artificial Sequence
  Synthetic Sequence
gtatggtgac

SEQ ID NO: 5386 - DNA, 10 bp, Artificial Sequence
  Synthetic Sequence
caagatctaa

SEQ ID NO: 5387 - DNA, 10 bp, Artificial Sequence
  Synthetic Sequence
gcatcgttgc

SEQ ID NO: 5388 - DNA, 10 bp, Artificial Sequence
  Synthetic Sequence
gattgagagc

SEQ ID NO: 5389 - DNA, 10 bp, Artificial Sequence
  Synthetic Sequence
gggaacgacc

SEQ ID NO: 5390 - DNA, 10 bp, Artificial Sequence
  Synthetic Sequence
ccgagagaac

SEQ ID NO: 5391 - DNA, 10 bp, Artificial Sequence
  Synthetic Sequence
ctctgtggta

SEQ ID NO: 5392 - DNA, 10 bp, Artificial Sequence
  Synthetic Sequence
ctatatagat

SEQ ID NO: 5393 - DNA, 10 bp, Artificial Sequence
  Synthetic Sequence
tctatatgat

SEQ ID NO: 5394 - DNA, 10 bp, Artificial Sequence
  Synthetic Sequence
ctatagcatg

SEQ ID NO: 5395 - DNA, 10 bp, Artificial Sequence
  Synthetic Sequence
taggatcact

SEQ ID NO: 5396 - DNA, 10 bp, Artificial Sequence
  Synthetic Sequence
ccagaataga

SEQ ID NO: 5397 - DNA, 10 bp, Artificial Sequence
  Synthetic Sequence
ttagataccg

SEQ ID NO: 5398 - DNA, 10 bp, Artificial Sequence
  Synthetic Sequence
aatagtggag

SEQ ID NO: 5399 - DNA, 10 bp, Artificial Sequence
  Synthetic Sequence
aagagtaacg

SEQ ID NO: 5400 - DNA, 10 bp, Artificial Sequence
  Synthetic Sequence
ctcgatttgg

SEQ ID NO: 5401 - DNA, 10 bp, Artificial Sequence
  Synthetic Sequence
gttgggctca

SEQ ID NO: 5402 - DNA, 10 bp, Artificial Sequence
  Synthetic Sequence
aacgacataa

SEQ ID NO: 5403 - DNA, 10 bp, Artificial Sequence
  Synthetic Sequence
gttaagttcc

SEQ ID NO: 5404 - DNA, 10 bp, Artificial Sequence
  Synthetic Sequence
gcatttacac

SEQ ID NO: 5405 - DNA, 10 bp, Artificial Sequence
  Synthetic Sequence
ggcccgcaat

SEQ ID NO: 5406 - DNA, 10 bp, Artificial Sequence
  Synthetic Sequence
taggtccaca

SEQ ID NO: 5407 - DNA, 10 bp, Artificial Sequence
  Synthetic Sequence
ttgtaaatag

SEQ ID NO: 5408 - DNA, 10 bp, Artificial Sequence
  Synthetic Sequence
gacctcaggg

SEQ ID NO: 5409 - DNA, 10 bp, Artificial Sequence
  Synthetic Sequence
tgcgcgcaga

SEQ ID NO: 5410 - DNA, 10 bp, Artificial Sequence
  Synthetic Sequence
acacgattgc

SEQ ID NO: 5411 - DNA, 10 bp, Artificial Sequence
  Synthetic Sequence
agtcgacctg

SEQ ID NO: 5412 - DNA, 10 bp, Artificial Sequence
  Synthetic Sequence
acacgatgcg

SEQ ID NO: 5413 - DNA, 10 bp, Artificial Sequence
  Synthetic Sequence
tttatacagt

SEQ ID NO: 5414 - DNA, 10 bp, Artificial Sequence
  Synthetic Sequence
tttctggatg

SEQ ID NO: 5415 - DNA, 10 bp, Artificial Sequence
  Synthetic Sequence
gtcaacgtga

SEQ ID NO: 5416 - DNA, 10 bp, Artificial Sequence
  Synthetic Sequence
ccggtcaaac

SEQ ID NO: 5417 - DNA, 10 bp, Artificial Sequence
  Synthetic Sequence
atagaaagcc

SEQ ID NO: 5418 - DNA, 10 bp, Artificial Sequence
  Synthetic Sequence
cgacagagta

SEQ ID NO: 5419 - DNA, 10 bp, Artificial Sequence
  Synthetic Sequence
ccttatcccg

SEQ ID NO: 5420 - DNA, 10 bp, Artificial Sequence
  Synthetic Sequence
caaaccacaa

SEQ ID NO: 5421 - DNA, 10 bp, Artificial Sequence
  Synthetic Sequence
tacattcact

SEQ ID NO: 5422 - DNA, 10 bp, Artificial Sequence
  Synthetic Sequence
cccgagtaag

SEQ ID NO: 5423 - DNA, 10 bp, Artificial Sequence
  Synthetic Sequence
atcgcgggac

SEQ ID NO: 5424 - DNA, 10 bp, Artificial Sequence
  Synthetic Sequence
gcaacagtta

SEQ ID NO: 5425 - DNA, 10 bp, Artificial Sequence
  Synthetic Sequence
gtgacctcac

SEQ ID NO: 5426 - DNA, 10 bp, Artificial Sequence
  Synthetic Sequence
gtcacaccga

SEQ ID NO: 5427 - DNA, 10 bp, Artificial Sequence
  Synthetic Sequence
gtgagaaagt

SEQ ID NO: 5428 - DNA, 10 bp, Artificial Sequence
  Synthetic Sequence
atgcgttagg

SEQ ID NO: 5429 - DNA, 10 bp, Artificial Sequence
  Synthetic Sequence
gccgttagtt

SEQ ID NO: 5430 - DNA, 10 bp, Artificial Sequence
  Synthetic Sequence
gagtcgtggg

SEQ ID NO: 5431 - DNA, 10 bp, Artificial Sequence
  Synthetic Sequence
tcttatgcgt

SEQ ID NO: 5432 - DNA, 10 bp, Artificial Sequence
  Synthetic Sequence
acatcctact

SEQ ID NO: 5433 - DNA, 10 bp, Artificial Sequence
  Synthetic Sequence
accggactag

SEQ ID NO: 5434 - DNA, 10 bp, Artificial Sequence
  Synthetic Sequence
atatttcagt

SEQ ID NO: 5435 - DNA, 10 bp, Artificial Sequence
  Synthetic Sequence
ggtggcctag

SEQ ID NO: 5436 - DNA, 10 bp, Artificial Sequence
  Synthetic Sequence
cccaactgga

SEQ ID NO: 5437 - DNA, 10 bp, Artificial Sequence
  Synthetic Sequence
gatttgactt

SEQ ID NO: 5438 - DNA, 10 bp, Artificial Sequence
  Synthetic Sequence
taacaacact

SEQ ID NO: 5439 - DNA, 10 bp, Artificial Sequence
  Synthetic Sequence
cccaccagaa

SEQ ID NO: 5440 - DNA, 10 bp, Artificial Sequence
  Synthetic Sequence
gacatcgaac

SEQ ID NO: 5441 - DNA, 10 bp, Artificial Sequence
  Synthetic Sequence
cttgttaaag

SEQ ID NO: 5442 - DNA, 10 bp, Artificial Sequence
  Synthetic Sequence
ctgttaacac

SEQ ID NO: 5443 - DNA, 10 bp, Artificial Sequence
  Synthetic Sequence
gtgctccata

SEQ ID NO: 5444 - DNA, 10 bp, Artificial Sequence
  Synthetic Sequence
cacagggtat

SEQ ID NO: 5445 - DNA, 10 bp, Artificial Sequence
  Synthetic Sequence
tctcgggtcc

SEQ ID NO: 5446 - DNA, 10 bp, Artificial Sequence
  Synthetic Sequence
ggagagtgtt

SEQ ID NO: 5447 - DNA, 10 bp, Artificial Sequence
  Synthetic Sequence
ccgcgtccat

SEQ ID NO: 5448 - DNA, 10 bp, Artificial Sequence
  Synthetic Sequence
ttaatctatc

SEQ ID NO: 5449 - DNA, 10 bp, Artificial Sequence
  Synthetic Sequence
aggagacggt

SEQ ID NO: 5450 - DNA, 10 bp, Artificial Sequence
  Synthetic Sequence
tagatgagaa

SEQ ID NO: 5451 - DNA, 10 bp, Artificial Sequence
  Synthetic Sequence
aggtccgtga

SEQ ID NO: 5452 - DNA, 10 bp, Artificial Sequence
  Synthetic Sequence
attcacgttc

SEQ ID NO: 5453 - DNA, 10 bp, Artificial Sequence
  Synthetic Sequence
ttctcccgct

SEQ ID NO: 5454 - DNA, 10 bp, Artificial Sequence
  Synthetic Sequence
cttgttagtt

SEQ ID NO: 5455 - DNA, 10 bp, Artificial Sequence
  Synthetic Sequence
tggcgcagaa

SEQ ID NO: 5456 - DNA, 10 bp, Artificial Sequence
  Synthetic Sequence
cgacttcatc

SEQ ID NO: 5457 - DNA, 10 bp, Artificial Sequence
  Synthetic Sequence
gggtcccttg

SEQ ID NO: 5458 - DNA, 10 bp, Artificial Sequence
  Synthetic Sequence
tactgatgcg

SEQ ID NO: 5459 - DNA, 10 bp, Artificial Sequence
  Synthetic Sequence
cgcagtctta

SEQ ID NO: 5460 - DNA, 10 bp, Artificial Sequence
  Synthetic Sequence
ttgtgtcgat

SEQ ID NO: 5461 - DNA, 10 bp, Artificial Sequence
  Synthetic Sequence
ttcaaattga

SEQ ID NO: 5462 - DNA, 10 bp, Artificial Sequence
  Synthetic Sequence
attaggtctg

SEQ ID NO: 5463 - DNA, 10 bp, Artificial Sequence
  Synthetic Sequence
ctcttagcgt

SEQ ID NO: 5464 - DNA, 10 bp, Artificial Sequence
  Synthetic Sequence
tgccttattt

SEQ ID NO: 5465 - DNA, 10 bp, Artificial Sequence
  Synthetic Sequence
cctccgttcg

SEQ ID NO: 5466 - DNA, 10 bp, Artificial Sequence
  Synthetic Sequence
taattcagcc

SEQ ID NO: 5467 - DNA, 10 bp, Artificial Sequence
  Synthetic Sequence
tatcggcggc

SEQ ID NO: 5468 - DNA, 10 bp, Artificial Sequence
  Synthetic Sequence
gaagggctgg

SEQ ID NO: 5469 - DNA, 10 bp, Artificial Sequence
  Synthetic Sequence
cccataatct

SEQ ID NO: 5470 - DNA, 10 bp, Artificial Sequence
  Synthetic Sequence
gtaaatatgg

SEQ ID NO: 5471 - DNA, 10 bp, Artificial Sequence
  Synthetic Sequence
taaaccggcc

SEQ ID NO: 5472 - DNA, 10 bp, Artificial Sequence
  Synthetic Sequence
gtccgagggt

SEQ ID NO: 5473 - DNA, 10 bp, Artificial Sequence
  Synthetic Sequence
agttctggtc

SEQ ID NO: 5474 - DNA, 10 bp, Artificial Sequence
  Synthetic Sequence
gtacaggatg

SEQ ID NO: 5475 - DNA, 10 bp, Artificial Sequence
  Synthetic Sequence
attctctatg

SEQ ID NO: 5476 - DNA, 10 bp, Artificial Sequence
  Synthetic Sequence
taacagcgag

SEQ ID NO: 5477 - DNA, 10 bp, Artificial Sequence
  Synthetic Sequence
accttcagat

SEQ ID NO: 5478 - DNA, 10 bp, Artificial Sequence
  Synthetic Sequence
attctaccag

SEQ ID NO: 5479 - DNA, 10 bp, Artificial Sequence
  Synthetic Sequence
tgatggtctt

SEQ ID NO: 5480 - DNA, 10 bp, Artificial Sequence
  Synthetic Sequence
aacatgtgac

SEQ ID NO: 5481 - DNA, 10 bp, Artificial Sequence
  Synthetic Sequence
ggaggtaccc

SEQ ID NO: 5482 - DNA, 10 bp, Artificial Sequence
  Synthetic Sequence
gttacccggt

SEQ ID NO: 5483 - DNA, 10 bp, Artificial Sequence
  Synthetic Sequence
tcggaggatt

SEQ ID NO: 5484 - DNA, 10 bp, Artificial Sequence
  Synthetic Sequence
tgtgttacct

SEQ ID NO: 5485 - DNA, 10 bp, Artificial Sequence
  Synthetic Sequence
gtgacccttc

SEQ ID NO: 5486 - DNA, 10 bp, Artificial Sequence
  Synthetic Sequence
caggcataac

SEQ ID NO: 5487 - DNA, 10 bp, Artificial Sequence
  Synthetic Sequence
ccactgtccg

SEQ ID NO: 5488 - DNA, 10 bp, Artificial Sequence
  Synthetic Sequence
agtaggttct

SEQ ID NO: 5489 - DNA, 10 bp, Artificial Sequence
  Synthetic Sequence
agctagaaga

SEQ ID NO: 5490 - DNA, 10 bp, Artificial Sequence
  Synthetic Sequence
cgatcaatta

SEQ ID NO: 5491 - DNA, 10 bp, Artificial Sequence
  Synthetic Sequence
agggataagg

SEQ ID NO: 5492 - DNA, 10 bp, Artificial Sequence
  Synthetic Sequence
gcccgtacag

SEQ ID NO: 5493 - DNA, 10 bp, Artificial Sequence
  Synthetic Sequence
accctcgtaa

SEQ ID NO: 5494 - DNA, 10 bp, Artificial Sequence
  Synthetic Sequence
tgagtctttc

SEQ ID NO: 5495 - DNA, 10 bp, Artificial Sequence
  Synthetic Sequence
ctctaataga

SEQ ID NO: 5496 - DNA, 10 bp, Artificial Sequence
  Synthetic Sequence
ctagcccgaa

SEQ ID NO: 5497 - DNA, 10 bp, Artificial Sequence
  Synthetic Sequence
ccaggttccg

SEQ ID NO: 5498 - DNA, 10 bp, Artificial Sequence
  Synthetic Sequence
ctaaattggg

SEQ ID NO: 5499 - DNA, 10 bp, Artificial Sequence
  Synthetic Sequence
cacggacctt

SEQ ID NO: 5500 - DNA, 10 bp, Artificial Sequence
  Synthetic Sequence
cgggaagcca

SEQ ID NO: 5501 - DNA, 10 bp, Artificial Sequence
  Synthetic Sequence
ccatgaggat

SEQ ID NO: 5502 - DNA, 10 bp, Artificial Sequence
  Synthetic Sequence
tggttaccga

SEQ ID NO: 5503 - DNA, 10 bp, Artificial Sequence
  Synthetic Sequence
gaatggatat

SEQ ID NO: 5504 - DNA, 10 bp, Artificial Sequence
  Synthetic Sequence
agggagtctt

SEQ ID NO: 5505 - DNA, 10 bp, Artificial Sequence
  Synthetic Sequence
accaacaatc

SEQ ID NO: 5506 - DNA, 10 bp, Artificial Sequence
  Synthetic Sequence
taaagtgtaa

SEQ ID NO: 5507 - DNA, 10 bp, Artificial Sequence
  Synthetic Sequence
accgcaaaga

SEQ ID NO: 5508 - DNA, 10 bp, Artificial Sequence
  Synthetic Sequence
tcagctttcg

SEQ ID NO: 5509 - DNA, 10 bp, Artificial Sequence
  Synthetic Sequence
cgggcaatat

SEQ ID NO: 5510 - DNA, 10 bp, Artificial Sequence
  Synthetic Sequence
atgtatatca

SEQ ID NO: 5511 - DNA, 10 bp, Artificial Sequence
  Synthetic Sequence
gtttcgaact

SEQ ID NO: 5512 - DNA, 10 bp, Artificial Sequence
  Synthetic Sequence
tcgtgaaaca

SEQ ID NO: 5513 - DNA, 10 bp, Artificial Sequence
  Synthetic Sequence
gattcgtcac

SEQ ID NO: 5514 - DNA, 10 bp, Artificial Sequence
  Synthetic Sequence
cactcctctg

SEQ ID NO: 5515 - DNA, 10 bp, Artificial Sequence
  Synthetic Sequence
gaggctgttc

SEQ ID NO: 5516 - DNA, 10 bp, Artificial Sequence
  Synthetic Sequence
cttatcctcc

SEQ ID NO: 5517 - DNA, 10 bp, Artificial Sequence
  Synthetic Sequence
gtagtatgga

SEQ ID NO: 5518 - DNA, 10 bp, Artificial Sequence
  Synthetic Sequence
agtattccat

SEQ ID NO: 5519 - DNA, 10 bp, Artificial Sequence
  Synthetic Sequence
aacagctccg

SEQ ID NO: 5520 - DNA, 10 bp, Artificial Sequence
  Synthetic Sequence
gcgtcttgtc

SEQ ID NO: 5521 - DNA, 10 bp, Artificial Sequence
  Synthetic Sequence
aggtgccgac

SEQ ID NO: 5522 - DNA, 10 bp, Artificial Sequence
  Synthetic Sequence
ttgcttatag

SEQ ID NO: 5523 - DNA, 10 bp, Artificial Sequence
  Synthetic Sequence
aactcgcctc

SEQ ID NO: 5524 - DNA, 10 bp, Artificial Sequence
  Synthetic Sequence
taacggaatt

SEQ ID NO: 5525 - DNA, 10 bp, Artificial Sequence
  Synthetic Sequence
ctttgaagaa

SEQ ID NO: 5526 - DNA, 10 bp, Artificial Sequence
  Synthetic Sequence
aaatttgcgt

SEQ ID NO: 5527 - DNA, 10 bp, Artificial Sequence
  Synthetic Sequence
ttggcagcag

SEQ ID NO: 5528 - DNA, 10 bp, Artificial Sequence
  Synthetic Sequence
tcccgctggt

SEQ ID NO: 5529 - DNA, 10 bp, Artificial Sequence
  Synthetic Sequence
gatgtaaatt

SEQ ID NO: 5530 - DNA, 10 bp, Artificial Sequence
  Synthetic Sequence
aacgttgctg

SEQ ID NO: 5531 - DNA, 10 bp, Artificial Sequence
  Synthetic Sequence
agccataggg

SEQ ID NO: 5532 - DNA, 10 bp, Artificial Sequence
  Synthetic Sequence
ggaagtccat

SEQ ID NO: 5533 - DNA, 10 bp, Artificial Sequence
  Synthetic Sequence
aacaatatct

SEQ ID NO: 5534 - DNA, 10 bp, Artificial Sequence
  Synthetic Sequence
actttaccac

SEQ ID NO: 5535 - DNA, 10 bp, Artificial Sequence
  Synthetic Sequence
ggaggatcgg

SEQ ID NO: 5536 - DNA, 10 bp, Artificial Sequence
  Synthetic Sequence
tctggagggt

SEQ ID NO: 5537 - DNA, 10 bp, Artificial Sequence
  Synthetic Sequence
tcgtcccttt

SEQ ID NO: 5538 - DNA, 10 bp, Artificial Sequence
  Synthetic Sequence
atctgatttg

SEQ ID NO: 5539 - DNA, 10 bp, Artificial Sequence
  Synthetic Sequence
atggcccaat

SEQ ID NO: 5540 - DNA, 10 bp, Artificial Sequence
  Synthetic Sequence
tccggaacag

SEQ ID NO: 5541 - DNA, 10 bp, Artificial Sequence
  Synthetic Sequence
agcctaaaca

SEQ ID NO: 5542 - DNA, 10 bp, Artificial Sequence
  Synthetic Sequence
gctacgctct

SEQ ID NO: 5543 - DNA, 10 bp, Artificial Sequence
  Synthetic Sequence
gattccgtag

SEQ ID NO: 5544 - DNA, 10 bp, Artificial Sequence
  Synthetic Sequence
tgtattcgtc

SEQ ID NO: 5545 - DNA, 10 bp, Artificial Sequence
  Synthetic Sequence
cttcggtccg

SEQ ID NO: 5546 - DNA, 10 bp, Artificial Sequence
  Synthetic Sequence
ataatccgcc

SEQ ID NO: 5547 - DNA, 10 bp, Artificial Sequence
  Synthetic Sequence
tcactagacc

SEQ ID NO: 5548 - DNA, 10 bp, Artificial Sequence
  Synthetic Sequence
tcagacccgc

SEQ ID NO: 5549 - DNA, 10 bp, Artificial Sequence
  Synthetic Sequence
ggagtgtacc

SEQ ID NO: 5550 - DNA, 10 bp, Artificial Sequence
  Synthetic Sequence
gggcgatcct

SEQ ID NO: 5551 - DNA, 10 bp, Artificial Sequence
  Synthetic Sequence
agttggactt

SEQ ID NO: 5552 - DNA, 10 bp, Artificial Sequence
  Synthetic Sequence
tgcaactccc

SEQ ID NO: 5553 - DNA, 10 bp, Artificial Sequence
  Synthetic Sequence
cgcgaaatgc

SEQ ID NO: 5554 - DNA, 10 bp, Artificial Sequence
  Synthetic Sequence
gctatatgta

SEQ ID NO: 5555 - DNA, 10 bp, Artificial Sequence
  Synthetic Sequence
agacatatct

SEQ ID NO: 5556 - DNA, 10 bp, Artificial Sequence
  Synthetic Sequence
tacatcccat

SEQ ID NO: 5557 - DNA, 10 bp, Artificial Sequence
  Synthetic Sequence
acagatgaca

SEQ ID NO: 5558 - DNA, 10 bp, Artificial Sequence
  Synthetic Sequence
tactctgatg

SEQ ID NO: 5559 - DNA, 10 bp, Artificial Sequence
  Synthetic Sequence
gacatgcttc

SEQ ID NO: 5560 - DNA, 10 bp, Artificial Sequence
  Synthetic Sequence
aggctcccgt

SEQ ID NO: 5561 - DNA, 10 bp, Artificial Sequence
  Synthetic Sequence
gtgacgaatt

SEQ ID NO: 5562 - DNA, 10 bp, Artificial Sequence
  Synthetic Sequence
cgtcaggatt

SEQ ID NO: 5563 - DNA, 10 bp, Artificial Sequence
  Synthetic Sequence
tgcctgcatc

SEQ ID NO: 5564 - DNA, 10 bp, Artificial Sequence
  Synthetic Sequence
tgaagagagg

SEQ ID NO: 5565 - DNA, 10 bp, Artificial Sequence
  Synthetic Sequence
ttatttggaa

SEQ ID NO: 5566 - DNA, 10 bp, Artificial Sequence
  Synthetic Sequence
tacaaggttg

SEQ ID NO: 5567 - DNA, 10 bp, Artificial Sequence
  Synthetic Sequence
ttgaaatacg

SEQ ID NO: 5568 - DNA, 10 bp, Artificial Sequence
  Synthetic Sequence
ttcacccata

SEQ ID NO: 5569 - DNA, 10 bp, Artificial Sequence
  Synthetic Sequence
ggacatgata

SEQ ID NO: 5570 - DNA, 10 bp, Artificial Sequence
  Synthetic Sequence
ttgacgcgcc

SEQ ID NO: 5571 - DNA, 10 bp, Artificial Sequence
  Synthetic Sequence
cttcgagcct

SEQ ID NO: 5572 - DNA, 10 bp, Artificial Sequence
  Synthetic Sequence
cttgttctgc

SEQ ID NO: 5573 - DNA, 10 bp, Artificial Sequence
  Synthetic Sequence
gcttcttctt

SEQ ID NO: 5574 - DNA, 10 bp, Artificial Sequence
  Synthetic Sequence
ggagacgaga

SEQ ID NO: 5575 - DNA, 10 bp, Artificial Sequence
  Synthetic Sequence
atcgttgtgc

SEQ ID NO: 5576 - DNA, 10 bp, Artificial Sequence
  Synthetic Sequence
tcgcccgatg

SEQ ID NO: 5577 - DNA, 10 bp, Artificial Sequence
  Synthetic Sequence
tatgggaagt

SEQ ID NO: 5578 - DNA, 10 bp, Artificial Sequence
  Synthetic Sequence
gaatctggcc

SEQ ID NO: 5579 - DNA, 10 bp, Artificial Sequence
  Synthetic Sequence
ctaaattaat

SEQ ID NO: 5580 - DNA, 10 bp, Artificial Sequence
  Synthetic Sequence
tatctccgag

SEQ ID NO: 5581 - DNA, 10 bp, Artificial Sequence
  Synthetic Sequence
acggtctacc

SEQ ID NO: 5582 - DNA, 10 bp, Artificial Sequence
  Synthetic Sequence
agcaggcctc

SEQ ID NO: 5583 - DNA, 10 bp, Artificial Sequence
  Synthetic Sequence
gtacgagccc

SEQ ID NO: 5584 - DNA, 10 bp, Artificial Sequence
  Synthetic Sequence
ggattgtcgc

SEQ ID NO: 5585 - DNA, 10 bp, Artificial Sequence
  Synthetic Sequence
gtcgtccgca

SEQ ID NO: 5586 - DNA, 10 bp, Artificial Sequence
  Synthetic Sequence
aagcgagggt

SEQ ID NO: 5587 - DNA, 10 bp, Artificial Sequence
  Synthetic Sequence
cgatgctgca

SEQ ID NO: 5588 - DNA, 10 bp, Artificial Sequence
  Synthetic Sequence
gcatgctcgt

SEQ ID NO: 5589 - DNA, 10 bp, Artificial Sequence
  Synthetic Sequence
cgttgctccc

SEQ ID NO: 5590 - DNA, 10 bp, Artificial Sequence
  Synthetic Sequence
tcgattatct

SEQ ID NO: 5591 - DNA, 10 bp, Artificial Sequence
  Synthetic Sequence
tatcgtgaag

SEQ ID NO: 5592 - DNA, 10 bp, Artificial Sequence
  Synthetic Sequence
ccgccttcag

SEQ ID NO: 5593 - DNA, 10 bp, Artificial Sequence
  Synthetic Sequence
cggattctag

SEQ ID NO: 5594 - DNA, 10 bp, Artificial Sequence
  Synthetic Sequence
ggatggtaag

SEQ ID NO: 5595 - DNA, 10 bp, Artificial Sequence
  Synthetic Sequence
catcgcgtgt

SEQ ID NO: 5596 - DNA, 10 bp, Artificial Sequence
  Synthetic Sequence
tccgtcgcga

SEQ ID NO: 5597 - DNA, 10 bp, Artificial Sequence
  Synthetic Sequence
accctagaga

SEQ ID NO: 5598 - DNA, 10 bp, Artificial Sequence
  Synthetic Sequence
gcggtgagct

SEQ ID NO: 5599 - DNA, 10 bp, Artificial Sequence
  Synthetic Sequence
gcggacgagt

SEQ ID NO: 5600 - DNA, 10 bp, Artificial Sequence
  Synthetic Sequence
ttgggctttc

SEQ ID NO: 5601 - DNA, 10 bp, Artificial Sequence
  Synthetic Sequence
agtctcggca

SEQ ID NO: 5602 - DNA, 10 bp, Artificial Sequence
  Synthetic Sequence
gcgacacata

SEQ ID NO: 5603 - DNA, 10 bp, Artificial Sequence
  Synthetic Sequence
ttggcgatct

SEQ ID NO: 5604 - DNA, 10 bp, Artificial Sequence
  Synthetic Sequence
accagtccta

SEQ ID NO: 5605 - DNA, 10 bp, Artificial Sequence
  Synthetic Sequence
aagctcttac

SEQ ID NO: 5606 - DNA, 10 bp, Artificial Sequence
  Synthetic Sequence
gatctgtgtc

SEQ ID NO: 5607 - DNA, 10 bp, Artificial Sequence
  Synthetic Sequence
gctgtgatta

SEQ ID NO: 5608 - DNA, 10 bp, Artificial Sequence
  Synthetic Sequence
ccgtctctcg

SEQ ID NO: 5609 - DNA, 10 bp, Artificial Sequence
  Synthetic Sequence
ggagggcaac

SEQ ID NO: 5610 - DNA, 10 bp, Artificial Sequence
  Synthetic Sequence
agtattataa

SEQ ID NO: 5611 - DNA, 10 bp, Artificial Sequence
  Synthetic Sequence
aattatcgag

SEQ ID NO: 5612 - DNA, 10 bp, Artificial Sequence
  Synthetic Sequence
atctattgcg

SEQ ID NO: 5613 - DNA, 10 bp, Artificial Sequence
  Synthetic Sequence
cgtagtgagt

SEQ ID NO: 5614 - DNA, 10 bp, Artificial Sequence
  Synthetic Sequence
ggaaatggag

SEQ ID NO: 5615 - DNA, 10 bp, Artificial Sequence
  Synthetic Sequence
agatggccca

SEQ ID NO: 5616 - DNA, 10 bp, Artificial Sequence
  Synthetic Sequence
caggaaccta

SEQ ID NO: 5617 - DNA, 10 bp, Artificial Sequence
  Synthetic Sequence
gatattgacg

SEQ ID NO: 5618 - DNA, 10 bp, Artificial Sequence
  Synthetic Sequence
tccactcgac

SEQ ID NO: 5619 - DNA, 10 bp, Artificial Sequence
  Synthetic Sequence
ctactctacg

SEQ ID NO: 5620 - DNA, 10 bp, Artificial Sequence
  Synthetic Sequence
acgtaccact

SEQ ID NO: 5621 - DNA, 10 bp, Artificial Sequence
  Synthetic Sequence
gtcggccagt

SEQ ID NO: 5622 - DNA, 10 bp, Artificial Sequence
  Synthetic Sequence
atgcacttgt

SEQ ID NO: 5623 - DNA, 10 bp, Artificial Sequence
  Synthetic Sequence
tcacaccgct

SEQ ID NO: 5624 - DNA, 10 bp, Artificial Sequence
  Synthetic Sequence
agacgtgccc

SEQ ID NO: 5625 - DNA, 10 bp, Artificial Sequence
  Synthetic Sequence
ctaggcggga

SEQ ID NO: 5626 - DNA, 10 bp, Artificial Sequence
  Synthetic Sequence
cgtgaaacaa

SEQ ID NO: 5627 - DNA, 10 bp, Artificial Sequence
  Synthetic Sequence
gcggcgacaa

SEQ ID NO: 5628 - DNA, 10 bp, Artificial Sequence
  Synthetic Sequence
attcagaaac

SEQ ID NO: 5629 - DNA, 10 bp, Artificial Sequence
  Synthetic Sequence
gaacgaccga

SEQ ID NO: 5630 - DNA, 10 bp, Artificial Sequence
  Synthetic Sequence
agggcacgct

SEQ ID NO: 5631 - DNA, 10 bp, Artificial Sequence
  Synthetic Sequence
cctgtatttg

SEQ ID NO: 5632 - DNA, 10 bp, Artificial Sequence
  Synthetic Sequence
tgtttacctt

SEQ ID NO: 5633 - DNA, 10 bp, Artificial Sequence
  Synthetic Sequence
actcttcggg

SEQ ID NO: 5634 - DNA, 10 bp, Artificial Sequence
  Synthetic Sequence
ggatacgcgt

SEQ ID NO: 5635 - DNA, 10 bp, Artificial Sequence
  Synthetic Sequence
gatgatataa

SEQ ID NO: 5636 - DNA, 10 bp, Artificial Sequence
  Synthetic Sequence
gctctaggag

SEQ ID NO: 5637 - DNA, 10 bp, Artificial Sequence
  Synthetic Sequence
atgcacagtt

SEQ ID NO: 5638 - DNA, 10 bp, Artificial Sequence
  Synthetic Sequence
agagacattc

SEQ ID NO: 5639 - DNA, 10 bp, Artificial Sequence
  Synthetic Sequence
gggctttcgg

SEQ ID NO: 5640 - DNA, 10 bp, Artificial Sequence
  Synthetic Sequence
aagaccggtc

SEQ ID NO: 5641 - DNA, 10 bp, Artificial Sequence
  Synthetic Sequence
tggaatccta

SEQ ID NO: 5642 - DNA, 10 bp, Artificial Sequence
  Synthetic Sequence
tctcgcagag

SEQ ID NO: 5643 - DNA, 10 bp, Artificial Sequence
  Synthetic Sequence
caagccaacc

SEQ ID NO: 5644 - DNA, 10 bp, Artificial Sequence
  Synthetic Sequence
ggtgttccga

SEQ ID NO: 5645 - DNA, 10 bp, Artificial Sequence
  Synthetic Sequence
catagaatct

SEQ ID NO: 5646 - DNA, 10 bp, Artificial Sequence
  Synthetic Sequence
aaccgtttaa

SEQ ID NO: 5647 - DNA, 10 bp, Artificial Sequence
  Synthetic Sequence
gagctggatg

SEQ ID NO: 5648 - DNA, 10 bp, Artificial Sequence
  Synthetic Sequence
ctggtcgaag

SEQ ID NO: 5649 - DNA, 10 bp, Artificial Sequence
  Synthetic Sequence
ccttacaata

SEQ ID NO: 5650 - DNA, 10 bp, Artificial Sequence
  Synthetic Sequence
accacttgcg

SEQ ID NO: 5651 - DNA, 10 bp, Artificial Sequence
  Synthetic Sequence
cgtgatcttc

SEQ ID NO: 5652 - DNA, 10 bp, Artificial Sequence
  Synthetic Sequence
ccggttatga

SEQ ID NO: 5653 - DNA, 10 bp, Artificial Sequence
  Synthetic Sequence
gagctaaagt

SEQ ID NO: 5654 - DNA, 10 bp, Artificial Sequence
  Synthetic Sequence
ggaccagtcc

SEQ ID NO: 5655 - DNA, 10 bp, Artificial Sequence
  Synthetic Sequence
gtttatcgaa

SEQ ID NO: 5656 - DNA, 10 bp, Artificial Sequence
  Synthetic Sequence
catcttccca

SEQ ID NO: 5657 - DNA, 10 bp, Artificial Sequence
  Synthetic Sequence
gtgatagggc

SEQ ID NO: 5658 - DNA, 10 bp, Artificial Sequence
  Synthetic Sequence
ggtggagcgt

SEQ ID NO: 5659 - DNA, 10 bp, Artificial Sequence
  Synthetic Sequence
ctgtatgcaa

SEQ ID NO: 5660 - DNA, 10 bp, Artificial Sequence
  Synthetic Sequence
acgcactgtc

SEQ ID NO: 5661 - DNA, 10 bp, Artificial Sequence
  Synthetic Sequence
atattcggtg

SEQ ID NO: 5662 - DNA, 10 bp, Artificial Sequence
  Synthetic Sequence
tacacaggct

SEQ ID NO: 5663 - DNA, 10 bp, Artificial Sequence
  Synthetic Sequence
ttcgacacgt

SEQ ID NO: 5664 - DNA, 10 bp, Artificial Sequence
  Synthetic Sequence
caaagcctaa

SEQ ID NO: 5665 - DNA, 10 bp, Artificial Sequence
  Synthetic Sequence
accggatgaa

SEQ ID NO: 5666 - DNA, 10 bp, Artificial Sequence
  Synthetic Sequence
cttcacggcc

SEQ ID NO: 5667 - DNA, 10 bp, Artificial Sequence
  Synthetic Sequence
ttgggctgct

SEQ ID NO: 5668 - DNA, 10 bp, Artificial Sequence
  Synthetic Sequence
gattgctgct

SEQ ID NO: 5669 - DNA, 10 bp, Artificial Sequence
  Synthetic Sequence
ctaacatgtg

SEQ ID NO: 5670 - DNA, 10 bp, Artificial Sequence
  Synthetic Sequence
aagtccggcg

SEQ ID NO: 5671 - DNA, 10 bp, Artificial Sequence
  Synthetic Sequence
tagtcgagac

SEQ ID NO: 5672 - DNA, 10 bp, Artificial Sequence
  Synthetic Sequence
gggctaaccc

SEQ ID NO: 5673 - DNA, 10 bp, Artificial Sequence
  Synthetic Sequence
ggagcttcta

SEQ ID NO: 5674 - DNA, 10 bp, Artificial Sequence
  Synthetic Sequence
aaaccggctt

SEQ ID NO: 5675 - DNA, 10 bp, Artificial Sequence
  Synthetic Sequence
tgacttgtac

SEQ ID NO: 5676 - DNA, 10 bp, Artificial Sequence
  Synthetic Sequence
gctggcactc

SEQ ID NO: 5677 - DNA, 10 bp, Artificial Sequence
  Synthetic Sequence
gctccagttt

SEQ ID NO: 5678 - DNA, 10 bp, Artificial Sequence
  Synthetic Sequence
agtttatcaa

SEQ ID NO: 5679 - DNA, 10 bp, Artificial Sequence
  Synthetic Sequence
tcgccgattg

SEQ ID NO: 5680 - DNA, 10 bp, Artificial Sequence
  Synthetic Sequence
tagccgtaaa

SEQ ID NO: 5681 - DNA, 10 bp, Artificial Sequence
  Synthetic Sequence
gtgcgctatc

SEQ ID NO: 5682 - DNA, 10 bp, Artificial Sequence
  Synthetic Sequence
taccactttg

SEQ ID NO: 5683 - DNA, 10 bp, Artificial Sequence
  Synthetic Sequence
accattctat

SEQ ID NO: 5684 - DNA, 10 bp, Artificial Sequence
  Synthetic Sequence
ttaaacacgg

SEQ ID NO: 5685 - DNA, 10 bp, Artificial Sequence
  Synthetic Sequence
cttactgtcc

SEQ ID NO: 5686 - DNA, 10 bp, Artificial Sequence
  Synthetic Sequence
tgttaatagg

SEQ ID NO: 5687 - DNA, 10 bp, Artificial Sequence
  Synthetic Sequence
ggtctatgtt

SEQ ID NO: 5688 - DNA, 10 bp, Artificial Sequence
  Synthetic Sequence
gggttgagta

SEQ ID NO: 5689 - DNA, 10 bp, Artificial Sequence
  Synthetic Sequence
ccatacgccc

SEQ ID NO: 5690 - DNA, 10 bp, Artificial Sequence
  Synthetic Sequence
aggcctctgt

SEQ ID NO: 5691 - DNA, 10 bp, Artificial Sequence
  Synthetic Sequence
ccaactcgta

SEQ ID NO: 5692 - DNA, 10 bp, Artificial Sequence
  Synthetic Sequence
cagtgtcaag

SEQ ID NO: 5693 - DNA, 10 bp, Artificial Sequence
  Synthetic Sequence
tagccttatc

SEQ ID NO: 5694 - DNA, 10 bp, Artificial Sequence
  Synthetic Sequence
cctcatctgg

SEQ ID NO: 5695 - DNA, 10 bp, Artificial Sequence
  Synthetic Sequence
ggtgaaagtt

SEQ ID NO: 5696 - DNA, 10 bp, Artificial Sequence
  Synthetic Sequence
ttgtgtatta

SEQ ID NO: 5697 - DNA, 10 bp, Artificial Sequence
  Synthetic Sequence
gccattggaa

SEQ ID NO: 5698 - DNA, 10 bp, Artificial Sequence
  Synthetic Sequence
tgagaacagg

SEQ ID NO: 5699 - DNA, 10 bp, Artificial Sequence
  Synthetic Sequence
aaggtgcgga

SEQ ID NO: 5700 - DNA, 10 bp, Artificial Sequence
  Synthetic Sequence
tacctgacaa

SEQ ID NO: 5701 - DNA, 10 bp, Artificial Sequence
  Synthetic Sequence
tgatgttagt

SEQ ID NO: 5702 - DNA, 10 bp, Artificial Sequence
  Synthetic Sequence
agaaagtttg

SEQ ID NO: 5703 - DNA, 10 bp, Artificial Sequence
  Synthetic Sequence
gcacatcgca

SEQ ID NO: 5704 - DNA, 10 bp, Artificial Sequence
  Synthetic Sequence
gtcaggcaag

SEQ ID NO: 5705 - DNA, 10 bp, Artificial Sequence
  Synthetic Sequence
tgtttcggcc

SEQ ID NO: 5706 - DNA, 10 bp, Artificial Sequence
  Synthetic Sequence
ggtacgagga

SEQ ID NO: 5707 - DNA, 10 bp, Artificial Sequence
  Synthetic Sequence
gtggtccctg

SEQ ID NO: 5708 - DNA, 10 bp, Artificial Sequence
  Synthetic Sequence
acattgcctt

SEQ ID NO: 5709 - DNA, 10 bp, Artificial Sequence
  Synthetic Sequence
gttagtggga

SEQ ID NO: 5710 - DNA, 10 bp, Artificial Sequence
  Synthetic Sequence
agtgtcgggt

SEQ ID NO: 5711 - DNA, 10 bp, Artificial Sequence
  Synthetic Sequence
gtcttacaga

SEQ ID NO: 5712 - DNA, 10 bp, Artificial Sequence
  Synthetic Sequence
acggatttgg

SEQ ID NO: 5713 - DNA, 10 bp, Artificial Sequence
  Synthetic Sequence
cagggtggag

SEQ ID NO: 5714 - DNA, 10 bp, Artificial Sequence
  Synthetic Sequence
aatacggtag

SEQ ID NO: 5715 - DNA, 10 bp, Artificial Sequence
  Synthetic Sequence
cagtcagcat

SEQ ID NO: 5716 - DNA, 10 bp, Artificial Sequence
  Synthetic Sequence
catggagacc

SEQ ID NO: 5717 - DNA, 10 bp, Artificial Sequence
  Synthetic Sequence
gtaccagcgg

SEQ ID NO: 5718 - DNA, 10 bp, Artificial Sequence
  Synthetic Sequence
tcgctacagc

SEQ ID NO: 5719 - DNA, 10 bp, Artificial Sequence
  Synthetic Sequence
cgtgtgcaaa

SEQ ID NO: 5720 - DNA, 10 bp, Artificial Sequence
  Synthetic Sequence
tgttgtgaac

SEQ ID NO: 5721 - DNA, 10 bp, Artificial Sequence
  Synthetic Sequence
ggaccctgga

SEQ ID NO: 5722 - DNA, 10 bp, Artificial Sequence
  Synthetic Sequence
catttgagta

SEQ ID NO: 5723 - DNA, 10 bp, Artificial Sequence
  Synthetic Sequence
cgtaattcac

SEQ ID NO: 5724 - DNA, 10 bp, Artificial Sequence
  Synthetic Sequence
cttcataact

SEQ ID NO: 5725 - DNA, 10 bp, Artificial Sequence
  Synthetic Sequence
cactcgctta

SEQ ID NO: 5726 - DNA, 10 bp, Artificial Sequence
  Synthetic Sequence
tcgggcccaa

SEQ ID NO: 5727 - DNA, 10 bp, Artificial Sequence
  Synthetic Sequence
gtcctgtcac

SEQ ID NO: 5728 - DNA, 10 bp, Artificial Sequence
  Synthetic Sequence
gagacgccga

SEQ ID NO: 5729 - DNA, 10 bp, Artificial Sequence
  Synthetic Sequence
atctaagatt

SEQ ID NO: 5730 - DNA, 10 bp, Artificial Sequence
  Synthetic Sequence
acctcattga

SEQ ID NO: 5731 - DNA, 10 bp, Artificial Sequence
  Synthetic Sequence
gagatgtgcg

SEQ ID NO: 5732 - DNA, 10 bp, Artificial Sequence
  Synthetic Sequence
cttatcttga

SEQ ID NO: 5733 - DNA, 10 bp, Artificial Sequence
  Synthetic Sequence
cgtagctgtt

SEQ ID NO: 5734 - DNA, 10 bp, Artificial Sequence
  Synthetic Sequence
agaaagcctt

SEQ ID NO: 5735 - DNA, 10 bp, Artificial Sequence
  Synthetic Sequence
gtcagccctc

SEQ ID NO: 5736 - DNA, 10 bp, Artificial Sequence
  Synthetic Sequence
cgatgagagt

SEQ ID NO: 5737 - DNA, 10 bp, Artificial Sequence
  Synthetic Sequence
gctcactgcc

SEQ ID NO: 5738 - DNA, 10 bp, Artificial Sequence
  Synthetic Sequence
ttcaggctta

SEQ ID NO: 5739 - DNA, 10 bp, Artificial Sequence
  Synthetic Sequence
tggcctttct

SEQ ID NO: 5740 - DNA, 10 bp, Artificial Sequence
  Synthetic Sequence
cttcggcacc

SEQ ID NO: 5741 - DNA, 10 bp, Artificial Sequence
  Synthetic Sequence
tactatcgta

SEQ ID NO: 5742 - DNA, 10 bp, Artificial Sequence
  Synthetic Sequence
tatagtctcc

SEQ ID NO: 5743 - DNA, 10 bp, Artificial Sequence
  Synthetic Sequence
cgcacctgtg

SEQ ID NO: 5744 - DNA, 10 bp, Artificial Sequence
  Synthetic Sequence
atcctaagta

SEQ ID NO: 5745 - DNA, 10 bp, Artificial Sequence
  Synthetic Sequence
aagtctgata

SEQ ID NO: 5746 - DNA, 10 bp, Artificial Sequence
  Synthetic Sequence
ccgttggaat

SEQ ID NO: 5747 - DNA, 10 bp, Artificial Sequence
  Synthetic Sequence
caaatataag

SEQ ID NO: 5748 - DNA, 10 bp, Artificial Sequence
  Synthetic Sequence
gccgtagttg

SEQ ID NO: 5749 - DNA, 10 bp, Artificial Sequence
  Synthetic Sequence
cccatgaagc

SEQ ID NO: 5750 - DNA, 10 bp, Artificial Sequence
  Synthetic Sequence
ggcgaactat

SEQ ID NO: 5751 - DNA, 10 bp, Artificial Sequence
  Synthetic Sequence
gtgaatatac

SEQ ID NO: 5752 - DNA, 10 bp, Artificial Sequence
  Synthetic Sequence
gagataccgt

SEQ ID NO: 5753 - DNA, 10 bp, Artificial Sequence
  Synthetic Sequence
tatgcctatc

SEQ ID NO: 5754 - DNA, 10 bp, Artificial Sequence
  Synthetic Sequence
ctgtgttaga

SEQ ID NO: 5755 - DNA, 10 bp, Artificial Sequence
  Synthetic Sequence
taaagaggtt

SEQ ID NO: 5756 - DNA, 10 bp, Artificial Sequence
  Synthetic Sequence
atgagtagtg

SEQ ID NO: 5757 - DNA, 10 bp, Artificial Sequence
  Synthetic Sequence
gagatcgtta

SEQ ID NO: 5758 - DNA, 10 bp, Artificial Sequence
  Synthetic Sequence
tgcgtcctgg

SEQ ID NO: 5759 - DNA, 10 bp, Artificial Sequence
  Synthetic Sequence
ggaaacgttc

SEQ ID NO: 5760 - DNA, 10 bp, Artificial Sequence
  Synthetic Sequence
tacttctcac

SEQ ID NO: 5761 - DNA, 10 bp, Artificial Sequence
  Synthetic Sequence
ctctccgcag

SEQ ID NO: 5762 - DNA, 10 bp, Artificial Sequence
  Synthetic Sequence
actaagcacg

SEQ ID NO: 5763 - DNA, 10 bp, Artificial Sequence
  Synthetic Sequence
aagctggtat

SEQ ID NO: 5764 - DNA, 10 bp, Artificial Sequence
  Synthetic Sequence
gggaggcttg

SEQ ID NO: 5765 - DNA, 10 bp, Artificial Sequence
  Synthetic Sequence
tggatccaag

SEQ ID NO: 5766 - DNA, 10 bp, Artificial Sequence
  Synthetic Sequence
cgttaaagag

SEQ ID NO: 5767 - DNA, 10 bp, Artificial Sequence
  Synthetic Sequence
atcacaccct

SEQ ID NO: 5768 - DNA, 10 bp, Artificial Sequence
  Synthetic Sequence
aatgcttaag

SEQ ID NO: 5769 - DNA, 10 bp, Artificial Sequence
  Synthetic Sequence
atggaaccag

SEQ ID NO: 5770 - DNA, 10 bp, Artificial Sequence
  Synthetic Sequence
gtgagcgaaa

SEQ ID NO: 5771 - DNA, 10 bp, Artificial Sequence
  Synthetic Sequence
tagtccctga

SEQ ID NO: 5772 - DNA, 10 bp, Artificial Sequence
  Synthetic Sequence
ctggtcaccc

SEQ ID NO: 5773 - DNA, 10 bp, Artificial Sequence
  Synthetic Sequence
acgaatttct

SEQ ID NO: 5774 - DNA, 10 bp, Artificial Sequence
  Synthetic Sequence
cgagtggaga

SEQ ID NO: 5775 - DNA, 10 bp, Artificial Sequence
  Synthetic Sequence
tcagtattag

SEQ ID NO: 5776 - DNA, 10 bp, Artificial Sequence
  Synthetic Sequence
gcaaatagga

SEQ ID NO: 5777 - DNA, 10 bp, Artificial Sequence
  Synthetic Sequence
ggcgttatgt

SEQ ID NO: 5778 - DNA, 10 bp, Artificial Sequence
  Synthetic Sequence
caccctcgtg

SEQ ID NO: 5779 - DNA, 10 bp, Artificial Sequence
  Synthetic Sequence
tttgactggc

SEQ ID NO: 5780 - DNA, 10 bp, Artificial Sequence
  Synthetic Sequence
ctgaaggcta

SEQ ID NO: 5781 - DNA, 10 bp, Artificial Sequence
  Synthetic Sequence
gtacaccacg

SEQ ID NO: 5782 - DNA, 10 bp, Artificial Sequence
  Synthetic Sequence
agtcccgcga

SEQ ID NO: 5783 - DNA, 10 bp, Artificial Sequence
  Synthetic Sequence
gatgacttgg

SEQ ID NO: 5784 - DNA, 10 bp, Artificial Sequence
  Synthetic Sequence
ttagtccgtt

SEQ ID NO: 5785 - DNA, 10 bp, Artificial Sequence
  Synthetic Sequence
aatgtgccgc

SEQ ID NO: 5786 - DNA, 10 bp, Artificial Sequence
  Synthetic Sequence
agtgtcgacg

SEQ ID NO: 5787 - DNA, 10 bp, Artificial Sequence
  Synthetic Sequence
aacgctggta

SEQ ID NO: 5788 - DNA, 10 bp, Artificial Sequence
  Synthetic Sequence
acatggcgga

SEQ ID NO: 5789 - DNA, 10 bp, Artificial Sequence
  Synthetic Sequence
ttagaatagc

SEQ ID NO: 5790 - DNA, 10 bp, Artificial Sequence
  Synthetic Sequence
gtcggactac

SEQ ID NO: 5791 - DNA, 10 bp, Artificial Sequence
  Synthetic Sequence
cgaggcttcg

SEQ ID NO: 5792 - DNA, 10 bp, Artificial Sequence
  Synthetic Sequence
ttagggcacg

SEQ ID NO: 5793 - DNA, 10 bp, Artificial Sequence
  Synthetic Sequence
ttcggccatg

SEQ ID NO: 5794 - DNA, 10 bp, Artificial Sequence
  Synthetic Sequence
ccgtagccct

SEQ ID NO: 5795 - DNA, 10 bp, Artificial Sequence
  Synthetic Sequence
aggtctaccc

SEQ ID NO: 5796 - DNA, 10 bp, Artificial Sequence
  Synthetic Sequence
ctgcagctgc

SEQ ID NO: 5797 - DNA, 10 bp, Artificial Sequence
  Synthetic Sequence
gtgcaatccg

SEQ ID NO: 5798 - DNA, 10 bp, Artificial Sequence
  Synthetic Sequence
attctggtgt

SEQ ID NO: 5799 - DNA, 10 bp, Artificial Sequence
  Synthetic Sequence
tactatctct

SEQ ID NO: 5800 - DNA, 10 bp, Artificial Sequence
  Synthetic Sequence
agagcctggg

SEQ ID NO: 5801 - DNA, 10 bp, Artificial Sequence
  Synthetic Sequence
tgtgtgttcg

SEQ ID NO: 5802 - DNA, 10 bp, Artificial Sequence
  Synthetic Sequence
gaagacctta

SEQ ID NO: 5803 - DNA, 10 bp, Artificial Sequence
  Synthetic Sequence
gtcaatcgtg

SEQ ID NO: 5804 - DNA, 10 bp, Artificial Sequence
  Synthetic Sequence
gtcccttggg

SEQ ID NO: 5805 - DNA, 10 bp, Artificial Sequence
  Synthetic Sequence
gccgcgtttc

SEQ ID NO: 5806 - DNA, 10 bp, Artificial Sequence
  Synthetic Sequence
aagcaaatgt

SEQ ID NO: 5807 - DNA, 10 bp, Artificial Sequence
  Synthetic Sequence
cggatgtgat

SEQ ID NO: 5808 - DNA, 10 bp, Artificial Sequence
  Synthetic Sequence
gcgccgttga

SEQ ID NO: 5809 - DNA, 10 bp, Artificial Sequence
  Synthetic Sequence
aggattgctt

SEQ ID NO: 5810 - DNA, 10 bp, Artificial Sequence
  Synthetic Sequence
atgccctctc

SEQ ID NO: 5811 - DNA, 10 bp, Artificial Sequence
  Synthetic Sequence
tacggcctca

SEQ ID NO: 5812 - DNA, 10 bp, Artificial Sequence
  Synthetic Sequence
gtttactgac

SEQ ID NO: 5813 - DNA, 10 bp, Artificial Sequence
  Synthetic Sequence
gcgtcctcat

SEQ ID NO: 5814 - DNA, 10 bp, Artificial Sequence
  Synthetic Sequence
agcactgtac

SEQ ID NO: 5815 - DNA, 10 bp, Artificial Sequence
  Synthetic Sequence
gtggacattg

SEQ ID NO: 5816 - DNA, 10 bp, Artificial Sequence
  Synthetic Sequence
tcgcttacaa

SEQ ID NO: 5817 - DNA, 10 bp, Artificial Sequence
  Synthetic Sequence
tcccaccgtg

SEQ ID NO: 5818 - DNA, 10 bp, Artificial Sequence
  Synthetic Sequence
aaggtgtcgt

SEQ ID NO: 5819 - DNA, 10 bp, Artificial Sequence
  Synthetic Sequence
gatcatgcga

SEQ ID NO: 5820 - DNA, 10 bp, Artificial Sequence
  Synthetic Sequence
cccagttctt

SEQ ID NO: 5821 - DNA, 10 bp, Artificial Sequence
  Synthetic Sequence
actcgctttc

SEQ ID NO: 5822 - DNA, 10 bp, Artificial Sequence
  Synthetic Sequence
ttcagtagcc

SEQ ID NO: 5823 - DNA, 10 bp, Artificial Sequence
  Synthetic Sequence
ggcctcgctt

SEQ ID NO: 5824 - DNA, 10 bp, Artificial Sequence
  Synthetic Sequence
gacggagact

SEQ ID NO: 5825 - DNA, 10 bp, Artificial Sequence
  Synthetic Sequence
cccacactgc

SEQ ID NO: 5826 - DNA, 10 bp, Artificial Sequence
  Synthetic Sequence
aacactgctt

SEQ ID NO: 5827 - DNA, 10 bp, Artificial Sequence
  Synthetic Sequence
actacgcatc

SEQ ID NO: 5828 - DNA, 10 bp, Artificial Sequence
  Synthetic Sequence
tcgttcagaa

SEQ ID NO: 5829 - DNA, 10 bp, Artificial Sequence
  Synthetic Sequence
tcaattcccg

SEQ ID NO: 5830 - DNA, 10 bp, Artificial Sequence
  Synthetic Sequence
agttgtctgc

SEQ ID NO: 5831 - DNA, 10 bp, Artificial Sequence
  Synthetic Sequence
ggtacgccgt

SEQ ID NO: 5832 - DNA, 10 bp, Artificial Sequence
  Synthetic Sequence
tgcattgatt

SEQ ID NO: 5833 - DNA, 10 bp, Artificial Sequence
  Synthetic Sequence
cgtgggtaga

SEQ ID NO: 5834 - DNA, 10 bp, Artificial Sequence
  Synthetic Sequence
attagcgtgg

SEQ ID NO: 5835 - DNA, 10 bp, Artificial Sequence
  Synthetic Sequence
tctccaggcc

SEQ ID NO: 5836 - DNA, 10 bp, Artificial Sequence
  Synthetic Sequence
gagttaaatc

SEQ ID NO: 5837 - DNA, 10 bp, Artificial Sequence
  Synthetic Sequence
gacgagttac

SEQ ID NO: 5838 - DNA, 10 bp, Artificial Sequence
  Synthetic Sequence
tccctttagt

SEQ ID NO: 5839 - DNA, 10 bp, Artificial Sequence
  Synthetic Sequence
ctacgactgt

SEQ ID NO: 5840 - DNA, 10 bp, Artificial Sequence
  Synthetic Sequence
taacgtcctg

SEQ ID NO: 5841 - DNA, 10 bp, Artificial Sequence
  Synthetic Sequence
gaacgccgct

SEQ ID NO: 5842 - DNA, 10 bp, Artificial Sequence
  Synthetic Sequence
tcccaacaca

SEQ ID NO: 5843 - DNA, 10 bp, Artificial Sequence
  Synthetic Sequence
catgggccat

SEQ ID NO: 5844 - DNA, 10 bp, Artificial Sequence
  Synthetic Sequence
aagcattagt

SEQ ID NO: 5845 - DNA, 10 bp, Artificial Sequence
  Synthetic Sequence
caattgtatg

SEQ ID NO: 5846 - DNA, 10 bp, Artificial Sequence
  Synthetic Sequence
accacagaaa

SEQ ID NO: 5847 - DNA, 10 bp, Artificial Sequence
  Synthetic Sequence
ggaccatgtc

SEQ ID NO: 5848 - DNA, 10 bp, Artificial Sequence
  Synthetic Sequence
gagcagaaga

SEQ ID NO: 5849 - DNA, 10 bp, Artificial Sequence
  Synthetic Sequence
ccctcatggg

SEQ ID NO: 5850 - DNA, 10 bp, Artificial Sequence
  Synthetic Sequence
atgcgatccc

SEQ ID NO: 5851 - DNA, 10 bp, Artificial Sequence
  Synthetic Sequence
gagctgcact

SEQ ID NO: 5852 - DNA, 10 bp, Artificial Sequence
  Synthetic Sequence
ccgattccac

SEQ ID NO: 5853 - DNA, 10 bp, Artificial Sequence
  Synthetic Sequence
cggcgtacta

SEQ ID NO: 5854 - DNA, 10 bp, Artificial Sequence
  Synthetic Sequence
ggtgacccgt

SEQ ID NO: 5855 - DNA, 10 bp, Artificial Sequence
  Synthetic Sequence
tggctgaggt

SEQ ID NO: 5856 - DNA, 10 bp, Artificial Sequence
  Synthetic Sequence
gtattaaatg

SEQ ID NO: 5857 - DNA, 10 bp, Artificial Sequence
  Synthetic Sequence
tgacattggt

SEQ ID NO: 5858 - DNA, 10 bp, Artificial Sequence
  Synthetic Sequence
agagtttaga

SEQ ID NO: 5859 - DNA, 10 bp, Artificial Sequence
  Synthetic Sequence
tatgtactgt

SEQ ID NO: 5860 - DNA, 10 bp, Artificial Sequence
  Synthetic Sequence
ttagacgtgt

SEQ ID NO: 5861 - DNA, 10 bp, Artificial Sequence
  Synthetic Sequence
caacggcatc

SEQ ID NO: 5862 - DNA, 10 bp, Artificial Sequence
  Synthetic Sequence
caatcgtgag

SEQ ID NO: 5863 - DNA, 10 bp, Artificial Sequence
  Synthetic Sequence
taaagcctct

SEQ ID NO: 5864 - DNA, 10 bp, Artificial Sequence
  Synthetic Sequence
ctaaatagta

SEQ ID NO: 5865 - DNA, 10 bp, Artificial Sequence
  Synthetic Sequence
agtttcgcct

SEQ ID NO: 5866 - DNA, 10 bp, Artificial Sequence
  Synthetic Sequence
cgttgtgtgg

SEQ ID NO: 5867 - DNA, 10 bp, Artificial Sequence
  Synthetic Sequence
cgttcgacgc

SEQ ID NO: 5868 - DNA, 10 bp, Artificial Sequence
  Synthetic Sequence
accgaaggtg

SEQ ID NO: 5869 - DNA, 10 bp, Artificial Sequence
  Synthetic Sequence
gccgaactgg

SEQ ID NO: 5870 - DNA, 10 bp, Artificial Sequence
  Synthetic Sequence
taaaggatta

SEQ ID NO: 5871 - DNA, 10 bp, Artificial Sequence
  Synthetic Sequence
acgtccatcc

SEQ ID NO: 5872 - DNA, 10 bp, Artificial Sequence
  Synthetic Sequence
atgttacgtg

SEQ ID NO: 5873 - DNA, 10 bp, Artificial Sequence
  Synthetic Sequence
gcgtacattt

SEQ ID NO: 5874 - DNA, 10 bp, Artificial Sequence
  Synthetic Sequence
ttcgtacttt

SEQ ID NO: 5875 - DNA, 10 bp, Artificial Sequence
  Synthetic Sequence
aactagctag

SEQ ID NO: 5876 - DNA, 10 bp, Artificial Sequence
  Synthetic Sequence
tcaagggaac

SEQ ID NO: 5877 - DNA, 10 bp, Artificial Sequence
  Synthetic Sequence
gcttacgcgc

SEQ ID NO: 5878 - DNA, 10 bp, Artificial Sequence
  Synthetic Sequence
ctcaatgacc

SEQ ID NO: 5879 - DNA, 10 bp, Artificial Sequence
  Synthetic Sequence
agactcttca

SEQ ID NO: 5880 - DNA, 10 bp, Artificial Sequence
  Synthetic Sequence
taattgtgtc

SEQ ID NO: 5881 - DNA, 10 bp, Artificial Sequence
  Synthetic Sequence
aacagatgca

SEQ ID NO: 5882 - DNA, 10 bp, Artificial Sequence
  Synthetic Sequence
aatgcaacta

SEQ ID NO: 5883 - DNA, 10 bp, Artificial Sequence
  Synthetic Sequence
cgtgcgaata

SEQ ID NO: 5884 - DNA, 10 bp, Artificial Sequence
  Synthetic Sequence
ataaccacac

SEQ ID NO: 5885 - DNA, 10 bp, Artificial Sequence
  Synthetic Sequence
tatgaaattt

SEQ ID NO: 5886 - DNA, 10 bp, Artificial Sequence
  Synthetic Sequence
cttacccgag

SEQ ID NO: 5887 - DNA, 10 bp, Artificial Sequence
  Synthetic Sequence
agtcgcaggc

SEQ ID NO: 5888 - DNA, 10 bp, Artificial Sequence
  Synthetic Sequence
gctcaataag

SEQ ID NO: 5889 - DNA, 10 bp, Artificial Sequence
  Synthetic Sequence
gttgcctcgg

SEQ ID NO: 5890 - DNA, 10 bp, Artificial Sequence
  Synthetic Sequence
tggccctgta

SEQ ID NO: 5891 - DNA, 10 bp, Artificial Sequence
  Synthetic Sequence
caagcgatac

SEQ ID NO: 5892 - DNA, 10 bp, Artificial Sequence
  Synthetic Sequence
ccgcatttat

SEQ ID NO: 5893 - DNA, 10 bp, Artificial Sequence
  Synthetic Sequence
tttactatac

SEQ ID NO: 5894 - DNA, 10 bp, Artificial Sequence
  Synthetic Sequence
acccatgtca

SEQ ID NO: 5895 - DNA, 10 bp, Artificial Sequence
  Synthetic Sequence
gtgctaggcg

SEQ ID NO: 5896 - DNA, 10 bp, Artificial Sequence
  Synthetic Sequence
tcgcgggaga

SEQ ID NO: 5897 - DNA, 10 bp, Artificial Sequence
  Synthetic Sequence
cctacgcgtt

SEQ ID NO: 5898 - DNA, 10 bp, Artificial Sequence
  Synthetic Sequence
agtaactcgt

SEQ ID NO: 5899 - DNA, 10 bp, Artificial Sequence
  Synthetic Sequence
gttggaacct

SEQ ID NO: 5900 - DNA, 10 bp, Artificial Sequence
  Synthetic Sequence
ttattagtgg

SEQ ID NO: 5901 - DNA, 10 bp, Artificial Sequence
  Synthetic Sequence
agagcacctt

SEQ ID NO: 5902 - DNA, 10 bp, Artificial Sequence
  Synthetic Sequence
caaccatctc

SEQ ID NO: 5903 - DNA, 10 bp, Artificial Sequence
  Synthetic Sequence
acctacttcg

SEQ ID NO: 5904 - DNA, 10 bp, Artificial Sequence
  Synthetic Sequence
tcacatgggc

SEQ ID NO: 5905 - DNA, 10 bp, Artificial Sequence
  Synthetic Sequence
cgtgcattct

SEQ ID NO: 5906 - DNA, 10 bp, Artificial Sequence
  Synthetic Sequence
aatataatag

SEQ ID NO: 5907 - DNA, 10 bp, Artificial Sequence
  Synthetic Sequence
gacgaggatt

SEQ ID NO: 5908 - DNA, 10 bp, Artificial Sequence
  Synthetic Sequence
acactataat

SEQ ID NO: 5909 - DNA, 10 bp, Artificial Sequence
  Synthetic Sequence
catttgtagt

SEQ ID NO: 5910 - DNA, 10 bp, Artificial Sequence
  Synthetic Sequence
atactttgtt

SEQ ID NO: 5911 - DNA, 10 bp, Artificial Sequence
  Synthetic Sequence
tggctgatac

SEQ ID NO: 5912 - DNA, 10 bp, Artificial Sequence
  Synthetic Sequence
accggcatac

SEQ ID NO: 5913 - DNA, 10 bp, Artificial Sequence
  Synthetic Sequence
cggagaatac

SEQ ID NO: 5914 - DNA, 10 bp, Artificial Sequence
  Synthetic Sequence
atcgtgtact

SEQ ID NO: 5915 - DNA, 10 bp, Artificial Sequence
  Synthetic Sequence
cgattaatcc

SEQ ID NO: 5916 - DNA, 10 bp, Artificial Sequence
  Synthetic Sequence
cagtaggtgc

SEQ ID NO: 5917 - DNA, 10 bp, Artificial Sequence
  Synthetic Sequence
ctactcgcgt

SEQ ID NO: 5918 - DNA, 10 bp, Artificial Sequence
  Synthetic Sequence
acttctatag

SEQ ID NO: 5919 - DNA, 10 bp, Artificial Sequence
  Synthetic Sequence
gcgaggacgt

SEQ ID NO: 5920 - DNA, 10 bp, Artificial Sequence
  Synthetic Sequence
agtgacgcca

SEQ ID NO: 5921 - DNA, 10 bp, Artificial Sequence
  Synthetic Sequence
ctcgtatggg

SEQ ID NO: 5922 - DNA, 10 bp, Artificial Sequence
  Synthetic Sequence
tagttgcggg

SEQ ID NO: 5923 - DNA, 10 bp, Artificial Sequence
  Synthetic Sequence
caccgggtga

SEQ ID NO: 5924 - DNA, 10 bp, Artificial Sequence
  Synthetic Sequence
atttcgcggg

SEQ ID NO: 5925 - DNA, 10 bp, Artificial Sequence
  Synthetic Sequence
tatagcggta

SEQ ID NO: 5926 - DNA, 10 bp, Artificial Sequence
  Synthetic Sequence
agcagcggtg

SEQ ID NO: 5927 - DNA, 10 bp, Artificial Sequence
  Synthetic Sequence
atactgcggg

SEQ ID NO: 5928 - DNA, 10 bp, Artificial Sequence
  Synthetic Sequence
tagtacgcta

SEQ ID NO: 5929 - DNA, 10 bp, Artificial Sequence
  Synthetic Sequence
atggttcgac

SEQ ID NO: 5930 - DNA, 10 bp, Artificial Sequence
  Synthetic Sequence
ccgtagctag

SEQ ID NO: 5931 - DNA, 10 bp, Artificial Sequence
  Synthetic Sequence
gtatcgacga

SEQ ID NO: 5932 - DNA, 10 bp, Artificial Sequence
  Synthetic Sequence
cgttggcggt

SEQ ID NO: 5933 - DNA, 10 bp, Artificial Sequence
  Synthetic Sequence
cgaaccaacg

SEQ ID NO: 5934 - DNA, 10 bp, Artificial Sequence
  Synthetic Sequence
cgcaaatata

SEQ ID NO: 5935 - DNA, 10 bp, Artificial Sequence
  Synthetic Sequence
agaacggtta

SEQ ID NO: 5936 - DNA, 10 bp, Artificial Sequence
  Synthetic Sequence
ggatcttcgt

SEQ ID NO: 5937 - DNA, 10 bp, Artificial Sequence
  Synthetic Sequence
caagatttcc

SEQ ID NO: 5938 - DNA, 10 bp, Artificial Sequence
  Synthetic Sequence
tttatcaacc

SEQ ID NO: 5939 - DNA, 10 bp, Artificial Sequence
  Synthetic Sequence
aatcttagtc

SEQ ID NO: 5940 - DNA, 10 bp, Artificial Sequence
  Synthetic Sequence
tccgttccat

SEQ ID NO: 5941 - DNA, 10 bp, Artificial Sequence
  Synthetic Sequence
agaacttcga

SEQ ID NO: 5942 - DNA, 10 bp, Artificial Sequence
  Synthetic Sequence
gagtctaacg

SEQ ID NO: 5943 - DNA, 10 bp, Artificial Sequence
  Synthetic Sequence
aagcacaata

SEQ ID NO: 5944 - DNA, 10 bp, Artificial Sequence
  Synthetic Sequence
cacgtctcct

SEQ ID NO: 5945 - DNA, 10 bp, Artificial Sequence
  Synthetic Sequence
caggtttgcc

SEQ ID NO: 5946 - DNA, 10 bp, Artificial Sequence
  Synthetic Sequence
attgttcccg

SEQ ID NO: 5947 - DNA, 10 bp, Artificial Sequence
  Synthetic Sequence
gggcctggat

SEQ ID NO: 5948 - DNA, 10 bp, Artificial Sequence
  Synthetic Sequence
attgcccgta

SEQ ID NO: 5949 - DNA, 10 bp, Artificial Sequence
  Synthetic Sequence
ttatcctctt

SEQ ID NO: 5950 - DNA, 10 bp, Artificial Sequence
  Synthetic Sequence
ggtaattgca

SEQ ID NO: 5951 - DNA, 10 bp, Artificial Sequence
  Synthetic Sequence
ccagctcggt

SEQ ID NO: 5952 - DNA, 10 bp, Artificial Sequence
  Synthetic Sequence
tattccatcc

SEQ ID NO: 5953 - DNA, 10 bp, Artificial Sequence
  Synthetic Sequence
aggccgatgg

SEQ ID NO: 5954 - DNA, 10 bp, Artificial Sequence
  Synthetic Sequence
aacaagccaa

SEQ ID NO: 5955 - DNA, 10 bp, Artificial Sequence
  Synthetic Sequence
tggttcaggg

SEQ ID NO: 5956 - DNA, 10 bp, Artificial Sequence
  Synthetic Sequence
gcccgctata

SEQ ID NO: 5957 - DNA, 10 bp, Artificial Sequence
  Synthetic Sequence
aatcgcatca

SEQ ID NO: 5958 - DNA, 10 bp, Artificial Sequence
  Synthetic Sequence
cgccattaaa

SEQ ID NO: 5959 - DNA, 10 bp, Artificial Sequence
  Synthetic Sequence
agtatttacc

SEQ ID NO: 5960 - DNA, 10 bp, Artificial Sequence
  Synthetic Sequence
ctaacaaata

SEQ ID NO: 5961 - DNA, 10 bp, Artificial Sequence
  Synthetic Sequence
tctgatatga

SEQ ID NO: 5962 - DNA, 10 bp, Artificial Sequence
  Synthetic Sequence
acgtctgtat

SEQ ID NO: 5963 - DNA, 10 bp, Artificial Sequence
  Synthetic Sequence
ctgtaactaa

SEQ ID NO: 5964 - DNA, 10 bp, Artificial Sequence
  Synthetic Sequence
gccaaaccta

SEQ ID NO: 5965 - DNA, 10 bp, Artificial Sequence
  Synthetic Sequence
ggctcttgtg

SEQ ID NO: 5966 - DNA, 10 bp, Artificial Sequence
  Synthetic Sequence
ggcgcctagt

SEQ ID NO: 5967 - DNA, 10 bp, Artificial Sequence
  Synthetic Sequence
ttagagcgtc

SEQ ID NO: 5968 - DNA, 10 bp, Artificial Sequence
  Synthetic Sequence
attacttcct

SEQ ID NO: 5969 - DNA, 10 bp, Artificial Sequence
  Synthetic Sequence
gacacaaggt

SEQ ID NO: 5970 - DNA, 10 bp, Artificial Sequence
  Synthetic Sequence
gacgaaactg

SEQ ID NO: 5971 - DNA, 10 bp, Artificial Sequence
  Synthetic Sequence
tcggtggcat

SEQ ID NO: 5972 - DNA, 10 bp, Artificial Sequence
  Synthetic Sequence
atattcctcg

SEQ ID NO: 5973 - DNA, 10 bp, Artificial Sequence
  Synthetic Sequence
gtgacagtac

SEQ ID NO: 5974 - DNA, 10 bp, Artificial Sequence
  Synthetic Sequence
tttcgcctac

SEQ ID NO: 5975 - DNA, 10 bp, Artificial Sequence
  Synthetic Sequence
tattagatgt

SEQ ID NO: 5976 - DNA, 10 bp, Artificial Sequence
  Synthetic Sequence
catcagacca

SEQ ID NO: 5977 - DNA, 10 bp, Artificial Sequence
  Synthetic Sequence
cctcgatata

SEQ ID NO: 5978 - DNA, 10 bp, Artificial Sequence
  Synthetic Sequence
aggtgacctc

SEQ ID NO: 5979 - DNA, 10 bp, Artificial Sequence
  Synthetic Sequence
tccattacga

SEQ ID NO: 5980 - DNA, 10 bp, Artificial Sequence
  Synthetic Sequence
tcgttcggcg

SEQ ID NO: 5981 - DNA, 10 bp, Artificial Sequence
  Synthetic Sequence
ataactttcg

SEQ ID NO: 5982 - DNA, 10 bp, Artificial Sequence
  Synthetic Sequence
cttgcatgga

SEQ ID NO: 5983 - DNA, 10 bp, Artificial Sequence
  Synthetic Sequence
tcagtttccc

SEQ ID NO: 5984 - DNA, 10 bp, Artificial Sequence
  Synthetic Sequence
tcggcgctgt

SEQ ID NO: 5985 - DNA, 10 bp, Artificial Sequence
  Synthetic Sequence
ccgcttcagg

SEQ ID NO: 5986 - DNA, 10 bp, Artificial Sequence
  Synthetic Sequence
gaaggtggac

SEQ ID NO: 5987 - DNA, 10 bp, Artificial Sequence
  Synthetic Sequence
gaacccgcta

SEQ ID NO: 5988 - DNA, 10 bp, Artificial Sequence
  Synthetic Sequence
tactttcctc

SEQ ID NO: 5989 - DNA, 10 bp, Artificial Sequence
  Synthetic Sequence
gcctgtaaat

SEQ ID NO: 5990 - DNA, 10 bp, Artificial Sequence
  Synthetic Sequence
cctgccaggt

SEQ ID NO: 5991 - DNA, 10 bp, Artificial Sequence
  Synthetic Sequence
taagttctct

SEQ ID NO: 5992 - DNA, 10 bp, Artificial Sequence
  Synthetic Sequence
aagcgcctaa

SEQ ID NO: 5993 - DNA, 10 bp, Artificial Sequence
  Synthetic Sequence
tttcggttta

SEQ ID NO: 5994 - DNA, 10 bp, Artificial Sequence
  Synthetic Sequence
tatggtcagc

SEQ ID NO: 5995 - DNA, 10 bp, Artificial Sequence
  Synthetic Sequence
agctttacgt

SEQ ID NO: 5996 - DNA, 10 bp, Artificial Sequence
  Synthetic Sequence
ttgtaccgaa

SEQ ID NO: 5997 - DNA, 10 bp, Artificial Sequence
  Synthetic Sequence
acaacatttc

SEQ ID NO: 5998 - DNA, 10 bp, Artificial Sequence
  Synthetic Sequence
gtagaatctg

SEQ ID NO: 5999 - DNA, 10 bp, Artificial Sequence
  Synthetic Sequence
agaatcgcat

SEQ ID NO: 6000 - DNA, 10 bp, Artificial Sequence
  Synthetic Sequence
ttgttgaccc

SEQ ID NO: 6001 - DNA, 10 bp, Artificial Sequence
  Synthetic Sequence
gtgtgcataa

SEQ ID NO: 6002 - DNA, 10 bp, Artificial Sequence
  Synthetic Sequence
acggattaac

SEQ ID NO: 6003 - DNA, 10 bp, Artificial Sequence
  Synthetic Sequence
gtgattcgcg

SEQ ID NO: 6004 - DNA, 10 bp, Artificial Sequence
  Synthetic Sequence
tagctcacct

SEQ ID NO: 6005 - DNA, 10 bp, Artificial Sequence
  Synthetic Sequence
cacaataaag

SEQ ID NO: 6006 - DNA, 10 bp, Artificial Sequence
  Synthetic Sequence
gatcttcaat

SEQ ID NO: 6007 - DNA, 10 bp, Artificial Sequence
  Synthetic Sequence
gccaataacg

SEQ ID NO: 6008 - DNA, 10 bp, Artificial Sequence
  Synthetic Sequence
tttaccatct

SEQ ID NO: 6009 - DNA, 10 bp, Artificial Sequence
  Synthetic Sequence
tcgattaggg

SEQ ID NO: 6010 - DNA, 10 bp, Artificial Sequence
  Synthetic Sequence
gtgacggcgt

SEQ ID NO: 6011 - DNA, 10 bp, Artificial Sequence
  Synthetic Sequence
ttacccgtcg

SEQ ID NO: 6012 - DNA, 10 bp, Artificial Sequence
  Synthetic Sequence
ggttcccgtc

SEQ ID NO: 6013 - DNA, 10 bp, Artificial Sequence
  Synthetic Sequence
atgtcgtgtc

SEQ ID NO: 6014 - DNA, 10 bp, Artificial Sequence
  Synthetic Sequence
ccctacctgc

SEQ ID NO: 6015 - DNA, 10 bp, Artificial Sequence
  Synthetic Sequence
tctagaacct

SEQ ID NO: 6016 - DNA, 10 bp, Artificial Sequence
  Synthetic Sequence
gggccacgtt

SEQ ID NO: 6017 - DNA, 10 bp, Artificial Sequence
  Synthetic Sequence
cagaatcaaa

SEQ ID NO: 6018 - DNA, 10 bp, Artificial Sequence
  Synthetic Sequence
gggctggaat

SEQ ID NO: 6019 - DNA, 10 bp, Artificial Sequence
  Synthetic Sequence
atgattcaat

SEQ ID NO: 6020 - DNA, 10 bp, Artificial Sequence
  Synthetic Sequence
agatactgtt

SEQ ID NO: 6021 - DNA, 10 bp, Artificial Sequence
  Synthetic Sequence
agggcagtcc

SEQ ID NO: 6022 - DNA, 10 bp, Artificial Sequence
  Synthetic Sequence
aggactttgc

SEQ ID NO: 6023 - DNA, 10 bp, Artificial Sequence
  Synthetic Sequence
atcagcccgt

SEQ ID NO: 6024 - DNA, 10 bp, Artificial Sequence
  Synthetic Sequence
tatggcacca

SEQ ID NO: 6025 - DNA, 10 bp, Artificial Sequence
  Synthetic Sequence
gtgtaacgag

SEQ ID NO: 6026 - DNA, 10 bp, Artificial Sequence
  Synthetic Sequence
gtgagcccat

SEQ ID NO: 6027 - DNA, 10 bp, Artificial Sequence
  Synthetic Sequence
ttctcgtagc

SEQ ID NO: 6028 - DNA, 10 bp, Artificial Sequence
  Synthetic Sequence
ttatagggtt

SEQ ID NO: 6029 - DNA, 10 bp, Artificial Sequence
  Synthetic Sequence
atagaaccta

SEQ ID NO: 6030 - DNA, 10 bp, Artificial Sequence
  Synthetic Sequence
cagacaccgg

SEQ ID NO: 6031 - DNA, 10 bp, Artificial Sequence
  Synthetic Sequence
tgtaaccctc

SEQ ID NO: 6032 - DNA, 10 bp, Artificial Sequence
  Synthetic Sequence
ttcccgcgac

SEQ ID NO: 6033 - DNA, 10 bp, Artificial Sequence
  Synthetic Sequence
ccgccatggt

SEQ ID NO: 6034 - DNA, 10 bp, Artificial Sequence
  Synthetic Sequence
aagctgcagg

SEQ ID NO: 6035 - DNA, 10 bp, Artificial Sequence
  Synthetic Sequence
cgaatgcgag

SEQ ID NO: 6036 - DNA, 10 bp, Artificial Sequence
  Synthetic Sequence
tgactccctt

SEQ ID NO: 6037 - DNA, 10 bp, Artificial Sequence
  Synthetic Sequence
tgccaggaag

SEQ ID NO: 6038 - DNA, 10 bp, Artificial Sequence
  Synthetic Sequence
catctggata

SEQ ID NO: 6039 - DNA, 10 bp, Artificial Sequence
  Synthetic Sequence
gtatttcgat

SEQ ID NO: 6040 - DNA, 10 bp, Artificial Sequence
  Synthetic Sequence
tggtcatcgt

SEQ ID NO: 6041 - DNA, 10 bp, Artificial Sequence
  Synthetic Sequence
tggtagactg

SEQ ID NO: 6042 - DNA, 10 bp, Artificial Sequence
  Synthetic Sequence
acgcacatgg

SEQ ID NO: 6043 - DNA, 10 bp, Artificial Sequence
  Synthetic Sequence
gacggctcca

SEQ ID NO: 6044 - DNA, 10 bp, Artificial Sequence
  Synthetic Sequence
gctaagggtg

SEQ ID NO: 6045 - DNA, 10 bp, Artificial Sequence
  Synthetic Sequence
accaatagtg

SEQ ID NO: 6046 - DNA, 10 bp, Artificial Sequence
  Synthetic Sequence
aactcgcagt

SEQ ID NO: 6047 - DNA, 10 bp, Artificial Sequence
  Synthetic Sequence
ctaaacaaga

SEQ ID NO: 6048 - DNA, 10 bp, Artificial Sequence
  Synthetic Sequence
acaaaccatt

SEQ ID NO: 6049 - DNA, 10 bp, Artificial Sequence
  Synthetic Sequence
ttactttact

SEQ ID NO: 6050 - DNA, 10 bp, Artificial Sequence
  Synthetic Sequence
ctaagacaaa

SEQ ID NO: 6051 - DNA, 10 bp, Artificial Sequence
  Synthetic Sequence
cgtttctcgg

SEQ ID NO: 6052 - DNA, 10 bp, Artificial Sequence
  Synthetic Sequence
gcaggcatgc

SEQ ID NO: 6053 - DNA, 10 bp, Artificial Sequence
  Synthetic Sequence
cgtttgggtc

SEQ ID NO: 6054 - DNA, 10 bp, Artificial Sequence
  Synthetic Sequence
ctcttgtcga

SEQ ID NO: 6055 - DNA, 10 bp, Artificial Sequence
  Synthetic Sequence
agcggcgtga

SEQ ID NO: 6056 - DNA, 10 bp, Artificial Sequence
  Synthetic Sequence
ctccggcttg

SEQ ID NO: 6057 - DNA, 10 bp, Artificial Sequence
  Synthetic Sequence
acttgtatcc

SEQ ID NO: 6058 - DNA, 10 bp, Artificial Sequence
  Synthetic Sequence
acgccgcaaa

SEQ ID NO: 6059 - DNA, 10 bp, Artificial Sequence
  Synthetic Sequence
gtagtctcaa

SEQ ID NO: 6060 - DNA, 10 bp, Artificial Sequence
  Synthetic Sequence
agtgtatggg

SEQ ID NO: 6061 - DNA, 10 bp, Artificial Sequence
  Synthetic Sequence
ccagcagtct

SEQ ID NO: 6062 - DNA, 10 bp, Artificial Sequence
  Synthetic Sequence
cgtcctatct

SEQ ID NO: 6063 - DNA, 10 bp, Artificial Sequence
  Synthetic Sequence
accatctgca

SEQ ID NO: 6064 - DNA, 10 bp, Artificial Sequence
  Synthetic Sequence
caccgctcag

SEQ ID NO: 6065 - DNA, 10 bp, Artificial Sequence
  Synthetic Sequence
ctatcgcaac

SEQ ID NO: 6066 - DNA, 10 bp, Artificial Sequence
  Synthetic Sequence
ccgtgagagg

SEQ ID NO: 6067 - DNA, 10 bp, Artificial Sequence
  Synthetic Sequence
aggcactctg

SEQ ID NO: 6068 - DNA, 10 bp, Artificial Sequence
  Synthetic Sequence
cttgtaccca

SEQ ID NO: 6069 - DNA, 10 bp, Artificial Sequence
  Synthetic Sequence
tttcactgtt

SEQ ID NO: 6070 - DNA, 10 bp, Artificial Sequence
  Synthetic Sequence
tgtacagatc

SEQ ID NO: 6071 - DNA, 10 bp, Artificial Sequence
  Synthetic Sequence
gatcccggct

SEQ ID NO: 6072 - DNA, 10 bp, Artificial Sequence
  Synthetic Sequence
taccgccaaa

SEQ ID NO: 6073 - DNA, 10 bp, Artificial Sequence
  Synthetic Sequence
gagatccagc

SEQ ID NO: 6074 - DNA, 10 bp, Artificial Sequence
  Synthetic Sequence
cagacgttgg

SEQ ID NO: 6075 - DNA, 10 bp, Artificial Sequence
  Synthetic Sequence
ctgatctcct

SEQ ID NO: 6076 - DNA, 10 bp, Artificial Sequence
  Synthetic Sequence
agaagttctt

SEQ ID NO: 6077 - DNA, 10 bp, Artificial Sequence
  Synthetic Sequence
gcccaggtct

SEQ ID NO: 6078 - DNA, 10 bp, Artificial Sequence
  Synthetic Sequence
acagggtcgc

SEQ ID NO: 6079 - DNA, 10 bp, Artificial Sequence
  Synthetic Sequence
gacagcgctt

SEQ ID NO: 6080 - DNA, 10 bp, Artificial Sequence
  Synthetic Sequence
cggtcatgaa

SEQ ID NO: 6081 - DNA, 10 bp, Artificial Sequence
  Synthetic Sequence
taaatgacca

SEQ ID NO: 6082 - DNA, 10 bp, Artificial Sequence
  Synthetic Sequence
actacatgag

SEQ ID NO: 6083 - DNA, 10 bp, Artificial Sequence
  Synthetic Sequence
cgtggtttat

SEQ ID NO: 6084 - DNA, 10 bp, Artificial Sequence
  Synthetic Sequence
acctacgggc

SEQ ID NO: 6085 - DNA, 10 bp, Artificial Sequence
  Synthetic Sequence
acaagaatcg

SEQ ID NO: 6086 - DNA, 10 bp, Artificial Sequence
  Synthetic Sequence
tatgtgagga

SEQ ID NO: 6087 - DNA, 10 bp, Artificial Sequence
  Synthetic Sequence
gaattacgga

SEQ ID NO: 6088 - DNA, 10 bp, Artificial Sequence
  Synthetic Sequence
cacccggcta

SEQ ID NO: 6089 - DNA, 10 bp, Artificial Sequence
  Synthetic Sequence
gcaattataa

SEQ ID NO: 6090 - DNA, 10 bp, Artificial Sequence
  Synthetic Sequence
ttgggtccta

SEQ ID NO: 6091 - DNA, 10 bp, Artificial Sequence
  Synthetic Sequence
gacaagtata

SEQ ID NO: 6092 - DNA, 10 bp, Artificial Sequence
  Synthetic Sequence
ggcaaaggtg

SEQ ID NO: 6093 - DNA, 10 bp, Artificial Sequence
  Synthetic Sequence
tatgtgcgtt

SEQ ID NO: 6094 - DNA, 10 bp, Artificial Sequence
  Synthetic Sequence
ttgggtaccc

SEQ ID NO: 6095 - DNA, 10 bp, Artificial Sequence
  Synthetic Sequence
ggttgggttc

SEQ ID NO: 6096 - DNA, 10 bp, Artificial Sequence
  Synthetic Sequence
gatttattgg

SEQ ID NO: 6097 - DNA, 10 bp, Artificial Sequence
  Synthetic Sequence
gttcgaacgg

SEQ ID NO: 6098 - DNA, 10 bp, Artificial Sequence
  Synthetic Sequence
ttatcgtgta

SEQ ID NO: 6099 - DNA, 10 bp, Artificial Sequence
  Synthetic Sequence
gggaagggtt

SEQ ID NO: 6100 - DNA, 10 bp, Artificial Sequence
  Synthetic Sequence
tataaaccac

SEQ ID NO: 6101 - DNA, 10 bp, Artificial Sequence
  Synthetic Sequence
cgagccaatt

SEQ ID NO: 6102 - DNA, 10 bp, Artificial Sequence
  Synthetic Sequence
acccggcaac

SEQ ID NO: 6103 - DNA, 10 bp, Artificial Sequence
  Synthetic Sequence
agcgtcctct

SEQ ID NO: 6104 - DNA, 10 bp, Artificial Sequence
  Synthetic Sequence
cccgatcgca

SEQ ID NO: 6105 - DNA, 10 bp, Artificial Sequence
  Synthetic Sequence
ggctttcacg

SEQ ID NO: 6106 - DNA, 10 bp, Artificial Sequence
  Synthetic Sequence
cttattacat

SEQ ID NO: 6107 - DNA, 10 bp, Artificial Sequence
  Synthetic Sequence
ttccagtttc

SEQ ID NO: 6108 - DNA, 10 bp, Artificial Sequence
  Synthetic Sequence
gtctgctgag

SEQ ID NO: 6109 - DNA, 10 bp, Artificial Sequence
  Synthetic Sequence
atgtgtactc

SEQ ID NO: 6110 - DNA, 10 bp, Artificial Sequence
  Synthetic Sequence
cgactaaagg

SEQ ID NO: 6111 - DNA, 10 bp, Artificial Sequence
  Synthetic Sequence
ccgaactact

SEQ ID NO: 6112 - DNA, 10 bp, Artificial Sequence
  Synthetic Sequence
ggtgtctggc

SEQ ID NO: 6113 - DNA, 10 bp, Artificial Sequence
  Synthetic Sequence
gcgtagcaaa

SEQ ID NO: 6114 - DNA, 10 bp, Artificial Sequence
  Synthetic Sequence
gccgtagagt

SEQ ID NO: 6115 - DNA, 10 bp, Artificial Sequence
  Synthetic Sequence
gtcaagccct

SEQ ID NO: 6116 - DNA, 10 bp, Artificial Sequence
  Synthetic Sequence
ccaaggaacc

SEQ ID NO: 6117 - DNA, 10 bp, Artificial Sequence
  Synthetic Sequence
ccctaaagac

SEQ ID NO: 6118 - DNA, 10 bp, Artificial Sequence
  Synthetic Sequence
aagcgataca

SEQ ID NO: 6119 - DNA, 10 bp, Artificial Sequence
  Synthetic Sequence
aagccgcgct

SEQ ID NO: 6120 - DNA, 10 bp, Artificial Sequence
  Synthetic Sequence
gccaaatccg

SEQ ID NO: 6121 - DNA, 10 bp, Artificial Sequence
  Synthetic Sequence
gactcgtgta

SEQ ID NO: 6122 - DNA, 10 bp, Artificial Sequence
  Synthetic Sequence
ccatacaggg

SEQ ID NO: 6123 - DNA, 10 bp, Artificial Sequence
  Synthetic Sequence
tgtaggcaga

SEQ ID NO: 6124 - DNA, 10 bp, Artificial Sequence
  Synthetic Sequence
ctctagaacg

SEQ ID NO: 6125 - DNA, 10 bp, Artificial Sequence
  Synthetic Sequence
ggtctagact

SEQ ID NO: 6126 - DNA, 10 bp, Artificial Sequence
  Synthetic Sequence
aaacttggga

SEQ ID NO: 6127 - DNA, 10 bp, Artificial Sequence
  Synthetic Sequence
aaagcgttcg

SEQ ID NO: 6128 - DNA, 10 bp, Artificial Sequence
  Synthetic Sequence
tcctttgtac

SEQ ID NO: 6129 - DNA, 10 bp, Artificial Sequence
  Synthetic Sequence
ccgaatgcct

SEQ ID NO: 6130 - DNA, 10 bp, Artificial Sequence
  Synthetic Sequence
cctgctattt

SEQ ID NO: 6131 - DNA, 10 bp, Artificial Sequence
  Synthetic Sequence
tggttaaagt

SEQ ID NO: 6132 - DNA, 10 bp, Artificial Sequence
  Synthetic Sequence
ctctcttgat

SEQ ID NO: 6133 - DNA, 10 bp, Artificial Sequence
  Synthetic Sequence
tccacaaagc

SEQ ID NO: 6134 - DNA, 10 bp, Artificial Sequence
  Synthetic Sequence
gttcgttcga

SEQ ID NO: 6135 - DNA, 10 bp, Artificial Sequence
  Synthetic Sequence
ctgccactct

SEQ ID NO: 6136 - DNA, 10 bp, Artificial Sequence
  Synthetic Sequence
catagtccac

SEQ ID NO: 6137 - DNA, 10 bp, Artificial Sequence
  Synthetic Sequence
gggtgagcaa

SEQ ID NO: 6138 - DNA, 10 bp, Artificial Sequence
  Synthetic Sequence
ggtcgaacac

SEQ ID NO: 6139 - DNA, 10 bp, Artificial Sequence
  Synthetic Sequence
cgccgtagca

SEQ ID NO: 6140 - DNA, 10 bp, Artificial Sequence
  Synthetic Sequence
catatctctt

SEQ ID NO: 6141 - DNA, 10 bp, Artificial Sequence
  Synthetic Sequence
cttaatccca

SEQ ID NO: 6142 - DNA, 10 bp, Artificial Sequence
  Synthetic Sequence
agccgcactc

SEQ ID NO: 6143 - DNA, 10 bp, Artificial Sequence
  Synthetic Sequence
cacggtacct

SEQ ID NO: 6144 - DNA, 10 bp, Artificial Sequence
  Synthetic Sequence
ggtatctgct

SEQ ID NO: 6145 - DNA, 10 bp, Artificial Sequence
  Synthetic Sequence
aatagcgacg

SEQ ID NO: 6146 - DNA, 10 bp, Artificial Sequence
  Synthetic Sequence
atttgccaca

SEQ ID NO: 6147 - DNA, 10 bp, Artificial Sequence
  Synthetic Sequence
ccacaacacg

SEQ ID NO: 6148 - DNA, 10 bp, Artificial Sequence
  Synthetic Sequence
tcttcgcatt

SEQ ID NO: 6149 - DNA, 10 bp, Artificial Sequence
  Synthetic Sequence
tacgccgtat

SEQ ID NO: 6150 - DNA, 10 bp, Artificial Sequence
  Synthetic Sequence
atgggtagaa

SEQ ID NO: 6151 - DNA, 10 bp, Artificial Sequence
  Synthetic Sequence
cgctttactc

SEQ ID NO: 6152 - DNA, 10 bp, Artificial Sequence
  Synthetic Sequence
cactgtatac

SEQ ID NO: 6153 - DNA, 10 bp, Artificial Sequence
  Synthetic Sequence
tacggcgcct

SEQ ID NO: 6154 - DNA, 10 bp, Artificial Sequence
  Synthetic Sequence
ctgacggacc

SEQ ID NO: 6155 - DNA, 10 bp, Artificial Sequence
  Synthetic Sequence
agcagtggca

SEQ ID NO: 6156 - DNA, 10 bp, Artificial Sequence
  Synthetic Sequence
cccggcagat

SEQ ID NO: 6157 - DNA, 10 bp, Artificial Sequence
  Synthetic Sequence
atcccacgcc

SEQ ID NO: 6158 - DNA, 10 bp, Artificial Sequence
  Synthetic Sequence
ccgatgcagt

SEQ ID NO: 6159 - DNA, 10 bp, Artificial Sequence
  Synthetic Sequence
cattaccttt

SEQ ID NO: 6160 - DNA, 10 bp, Artificial Sequence
  Synthetic Sequence
atttggtgta

SEQ ID NO: 6161 - DNA, 10 bp, Artificial Sequence
  Synthetic Sequence
gtgaggcgaa

SEQ ID NO: 6162 - DNA, 10 bp, Artificial Sequence
  Synthetic Sequence
cacggttctg

SEQ ID NO: 6163 - DNA, 10 bp, Artificial Sequence
  Synthetic Sequence
ctatcctgcg

SEQ ID NO: 6164 - DNA, 10 bp, Artificial Sequence
  Synthetic Sequence
acattaaggg

SEQ ID NO: 6165 - DNA, 10 bp, Artificial Sequence
  Synthetic Sequence
tagattgaaa

SEQ ID NO: 6166 - DNA, 10 bp, Artificial Sequence
  Synthetic Sequence
taccgtgtgg

SEQ ID NO: 6167 - DNA, 10 bp, Artificial Sequence
  Synthetic Sequence
cgtgattcct

SEQ ID NO: 6168 - DNA, 10 bp, Artificial Sequence
  Synthetic Sequence
gacgcgatta

SEQ ID NO: 6169 - DNA, 10 bp, Artificial Sequence
  Synthetic Sequence
tagtcattta

SEQ ID NO: 6170 - DNA, 10 bp, Artificial Sequence
  Synthetic Sequence
agttccacag

SEQ ID NO: 6171 - DNA, 10 bp, Artificial Sequence
  Synthetic Sequence
cttgtaaacc

SEQ ID NO: 6172 - DNA, 10 bp, Artificial Sequence
  Synthetic Sequence
cattctaagt

SEQ ID NO: 6173 - DNA, 10 bp, Artificial Sequence
  Synthetic Sequence
ttgcggagat

SEQ ID NO: 6174 - DNA, 10 bp, Artificial Sequence
  Synthetic Sequence
aaggcgcttt

SEQ ID NO: 6175 - DNA, 10 bp, Artificial Sequence
  Synthetic Sequence
ccaaccttgc

SEQ ID NO: 6176 - DNA, 10 bp, Artificial Sequence
  Synthetic Sequence
tattgtacaa

SEQ ID NO: 6177 - DNA, 10 bp, Artificial Sequence
  Synthetic Sequence
ccggcaatgg

SEQ ID NO: 6178 - DNA, 10 bp, Artificial Sequence
  Synthetic Sequence
cctgcaggca

SEQ ID NO: 6179 - DNA, 10 bp, Artificial Sequence
  Synthetic Sequence
gtaccttgca

SEQ ID NO: 6180 - DNA, 10 bp, Artificial Sequence
  Synthetic Sequence
ggagagacta

SEQ ID NO: 6181 - DNA, 10 bp, Artificial Sequence
  Synthetic Sequence
acgggtcgct

SEQ ID NO: 6182 - DNA, 10 bp, Artificial Sequence
  Synthetic Sequence
gacttcatag

SEQ ID NO: 6183 - DNA, 10 bp, Artificial Sequence
  Synthetic Sequence
caaagcatgc

SEQ ID NO: 6184 - DNA, 10 bp, Artificial Sequence
  Synthetic Sequence
actaggctaa

SEQ ID NO: 6185 - DNA, 10 bp, Artificial Sequence
  Synthetic Sequence
gggccagaca

SEQ ID NO: 6186 - DNA, 10 bp, Artificial Sequence
  Synthetic Sequence
tcacccagcc

SEQ ID NO: 6187 - DNA, 10 bp, Artificial Sequence
  Synthetic Sequence
gtagtgaact

SEQ ID NO: 6188 - DNA, 10 bp, Artificial Sequence
  Synthetic Sequence
aattgtgatg

SEQ ID NO: 6189 - DNA, 10 bp, Artificial Sequence
  Synthetic Sequence
tccagctgag

SEQ ID NO: 6190 - DNA, 10 bp, Artificial Sequence
  Synthetic Sequence
ggacctggtg

SEQ ID NO: 6191 - DNA, 10 bp, Artificial Sequence
  Synthetic Sequence
gctgagcagt

SEQ ID NO: 6192 - DNA, 10 bp, Artificial Sequence
  Synthetic Sequence
acatgaccat

SEQ ID NO: 6193 - DNA, 10 bp, Artificial Sequence
  Synthetic Sequence
tgactgccaa

SEQ ID NO: 6194 - DNA, 10 bp, Artificial Sequence
  Synthetic Sequence
atgcaggatt

SEQ ID NO: 6195 - DNA, 10 bp, Artificial Sequence
  Synthetic Sequence
atcgggtaag

SEQ ID NO: 6196 - DNA, 10 bp, Artificial Sequence
  Synthetic Sequence
cgtccgtcga

SEQ ID NO: 6197 - DNA, 10 bp, Artificial Sequence
  Synthetic Sequence
gttgtgagag

SEQ ID NO: 6198 - DNA, 10 bp, Artificial Sequence
  Synthetic Sequence
tacaactgct

SEQ ID NO: 6199 - DNA, 10 bp, Artificial Sequence
  Synthetic Sequence
tattcacgtc

SEQ ID NO: 6200 - DNA, 10 bp, Artificial Sequence
  Synthetic Sequence
agccgctcca

SEQ ID NO: 6201 - DNA, 10 bp, Artificial Sequence
  Synthetic Sequence
cactcgaatg

SEQ ID NO: 6202 - DNA, 10 bp, Artificial Sequence
  Synthetic Sequence
tactgcccag

SEQ ID NO: 6203 - DNA, 10 bp, Artificial Sequence
  Synthetic Sequence
atagtcgtgg

SEQ ID NO: 6204 - DNA, 10 bp, Artificial Sequence
  Synthetic Sequence
ggcaccttct

SEQ ID NO: 6205 - DNA, 10 bp, Artificial Sequence
  Synthetic Sequence
acgagaaagg

SEQ ID NO: 6206 - DNA, 10 bp, Artificial Sequence
  Synthetic Sequence
taactaagtc

SEQ ID NO: 6207 - DNA, 10 bp, Artificial Sequence
  Synthetic Sequence
ccctgttcca

SEQ ID NO: 6208 - DNA, 10 bp, Artificial Sequence
  Synthetic Sequence
cgggcaacga

SEQ ID NO: 6209 - DNA, 10 bp, Artificial Sequence
  Synthetic Sequence
acaggcgcag

SEQ ID NO: 6210 - DNA, 10 bp, Artificial Sequence
  Synthetic Sequence
atttattacc

SEQ ID NO: 6211 - DNA, 10 bp, Artificial Sequence
  Synthetic Sequence
gagtttacgg

SEQ ID NO: 6212 - DNA, 10 bp, Artificial Sequence
  Synthetic Sequence
aggagaattt

SEQ ID NO: 6213 - DNA, 10 bp, Artificial Sequence
  Synthetic Sequence
tcgtgtgttg

SEQ ID NO: 6214 - DNA, 10 bp, Artificial Sequence
  Synthetic Sequence
tggccaaccg

SEQ ID NO: 6215 - DNA, 10 bp, Artificial Sequence
  Synthetic Sequence
taatccggat

SEQ ID NO: 6216 - DNA, 10 bp, Artificial Sequence
  Synthetic Sequence
cgtagcggca

SEQ ID NO: 6217 - DNA, 10 bp, Artificial Sequence
  Synthetic Sequence
catttaactc

SEQ ID NO: 6218 - DNA, 10 bp, Artificial Sequence
  Synthetic Sequence
tctcatttgt

SEQ ID NO: 6219 - DNA, 10 bp, Artificial Sequence
  Synthetic Sequence
aagacaacat

SEQ ID NO: 6220 - DNA, 10 bp, Artificial Sequence
  Synthetic Sequence
gcagagggag

SEQ ID NO: 6221 - DNA, 10 bp, Artificial Sequence
  Synthetic Sequence
atctaggcgg

SEQ ID NO: 6222 - DNA, 10 bp, Artificial Sequence
  Synthetic Sequence
aaacttgccg

SEQ ID NO: 6223 - DNA, 10 bp, Artificial Sequence
  Synthetic Sequence
tctttagcgg

SEQ ID NO: 6224 - DNA, 10 bp, Artificial Sequence
  Synthetic Sequence
gactgtattt

SEQ ID NO: 6225 - DNA, 10 bp, Artificial Sequence
  Synthetic Sequence
tacatgcaaa

SEQ ID NO: 6226 - DNA, 10 bp, Artificial Sequence
  Synthetic Sequence
gttgtggttt

SEQ ID NO: 6227 - DNA, 10 bp, Artificial Sequence
  Synthetic Sequence
gtctggatta

SEQ ID NO: 6228 - DNA, 10 bp, Artificial Sequence
  Synthetic Sequence
tactcaccat

SEQ ID NO: 6229 - DNA, 10 bp, Artificial Sequence
  Synthetic Sequence
agcagtccct

SEQ ID NO: 6230 - DNA, 10 bp, Artificial Sequence
  Synthetic Sequence
cccgacatcc

SEQ ID NO: 6231 - DNA, 10 bp, Artificial Sequence
  Synthetic Sequence
tttaagggct

SEQ ID NO: 6232 - DNA, 10 bp, Artificial Sequence
  Synthetic Sequence
agacgggcag

SEQ ID NO: 6233 - DNA, 10 bp, Artificial Sequence
  Synthetic Sequence
caggaagtac

SEQ ID NO: 6234 - DNA, 10 bp, Artificial Sequence
  Synthetic Sequence
gcaccggcaa

SEQ ID NO: 6235 - DNA, 10 bp, Artificial Sequence
  Synthetic Sequence
cagctcctca

SEQ ID NO: 6236 - DNA, 10 bp, Artificial Sequence
  Synthetic Sequence
aacaccgcca

SEQ ID NO: 6237 - DNA, 10 bp, Artificial Sequence
  Synthetic Sequence
aactagaccc

SEQ ID NO: 6238 - DNA, 10 bp, Artificial Sequence
  Synthetic Sequence
tgaagcggac

SEQ ID NO: 6239 - DNA, 10 bp, Artificial Sequence
  Synthetic Sequence
gatcgataac

SEQ ID NO: 6240 - DNA, 10 bp, Artificial Sequence
  Synthetic Sequence
ggtaaagaac

SEQ ID NO: 6241 - DNA, 10 bp, Artificial Sequence
  Synthetic Sequence
taaacacctt

SEQ ID NO: 6242 - DNA, 10 bp, Artificial Sequence
  Synthetic Sequence
tatctattcc

SEQ ID NO: 6243 - DNA, 10 bp, Artificial Sequence
  Synthetic Sequence
agcctgagct

SEQ ID NO: 6244 - DNA, 10 bp, Artificial Sequence
  Synthetic Sequence
cgccgtattc

SEQ ID NO: 6245 - DNA, 10 bp, Artificial Sequence
  Synthetic Sequence
cgttaagtgc

SEQ ID NO: 6246 - DNA, 10 bp, Artificial Sequence
  Synthetic Sequence
gctggccttt

SEQ ID NO: 6247 - DNA, 10 bp, Artificial Sequence
  Synthetic Sequence
gtaacaattg

SEQ ID NO: 6248 - DNA, 10 bp, Artificial Sequence
  Synthetic Sequence
atatccacta

SEQ ID NO: 6249 - DNA, 10 bp, Artificial Sequence
  Synthetic Sequence
catccgaggc

SEQ ID NO: 6250 - DNA, 10 bp, Artificial Sequence
  Synthetic Sequence
ttaggcggag

SEQ ID NO: 6251 - DNA, 10 bp, Artificial Sequence
  Synthetic Sequence
cgacaaatat

SEQ ID NO: 6252 - DNA, 10 bp, Artificial Sequence
  Synthetic Sequence
ggttagagat

SEQ ID NO: 6253 - DNA, 10 bp, Artificial Sequence
  Synthetic Sequence
cggactcgtg

SEQ ID NO: 6254 - DNA, 10 bp, Artificial Sequence
  Synthetic Sequence
cttgccaaat

SEQ ID NO: 6255 - DNA, 10 bp, Artificial Sequence
  Synthetic Sequence
taatgaccta

SEQ ID NO: 6256 - DNA, 10 bp, Artificial Sequence
  Synthetic Sequence
tcgtgttgga

SEQ ID NO: 6257 - DNA, 10 bp, Artificial Sequence
  Synthetic Sequence
gtacccatga

SEQ ID NO: 6258 - DNA, 10 bp, Artificial Sequence
  Synthetic Sequence
acgtcaccag

SEQ ID NO: 6259 - DNA, 10 bp, Artificial Sequence
  Synthetic Sequence
tcaattctga

SEQ ID NO: 6260 - DNA, 10 bp, Artificial Sequence
  Synthetic Sequence
gaccagctgg

SEQ ID NO: 6261 - DNA, 10 bp, Artificial Sequence
  Synthetic Sequence
tataccgtgg

SEQ ID NO: 6262 - DNA, 10 bp, Artificial Sequence
  Synthetic Sequence
cgcagcgaag

SEQ ID NO: 6263 - DNA, 10 bp, Artificial Sequence
  Synthetic Sequence
gaatatttat

SEQ ID NO: 6264 - DNA, 10 bp, Artificial Sequence
  Synthetic Sequence
ggtgagtccg

SEQ ID NO: 6265 - DNA, 10 bp, Artificial Sequence
  Synthetic Sequence
tgatggcacc

SEQ ID NO: 6266 - DNA, 10 bp, Artificial Sequence
  Synthetic Sequence
ttcatgacgc

SEQ ID NO: 6267 - DNA, 10 bp, Artificial Sequence
  Synthetic Sequence
agtagaagta

SEQ ID NO: 6268 - DNA, 10 bp, Artificial Sequence
  Synthetic Sequence
ctatgtaagg

SEQ ID NO: 6269 - DNA, 10 bp, Artificial Sequence
  Synthetic Sequence
ctggcgccat

SEQ ID NO: 6270 - DNA, 10 bp, Artificial Sequence
  Synthetic Sequence
aaccgcattt

SEQ ID NO: 6271 - DNA, 10 bp, Artificial Sequence
  Synthetic Sequence
tttccgacat

SEQ ID NO: 6272 - DNA, 10 bp, Artificial Sequence
  Synthetic Sequence
aggaaccatg

SEQ ID NO: 6273 - DNA, 10 bp, Artificial Sequence
  Synthetic Sequence
acgaaatcac

SEQ ID NO: 6274 - DNA, 10 bp, Artificial Sequence
  Synthetic Sequence
agagatacca

SEQ ID NO: 6275 - DNA, 10 bp, Artificial Sequence
  Synthetic Sequence
acggacgctg

SEQ ID NO: 6276 - DNA, 10 bp, Artificial Sequence
  Synthetic Sequence
acgtagtgcg

SEQ ID NO: 6277 - DNA, 10 bp, Artificial Sequence
  Synthetic Sequence
gaccgctctc

SEQ ID NO: 6278 - DNA, 10 bp, Artificial Sequence
  Synthetic Sequence
ttgtgctcaa

SEQ ID NO: 6279 - DNA, 10 bp, Artificial Sequence
  Synthetic Sequence
tgctgcgtgg

SEQ ID NO: 6280 - DNA, 10 bp, Artificial Sequence
  Synthetic Sequence
gtattccatc

SEQ ID NO: 6281 - DNA, 10 bp, Artificial Sequence
  Synthetic Sequence
tcaaacagag

SEQ ID NO: 6282 - DNA, 10 bp, Artificial Sequence
  Synthetic Sequence
ttccgacttc

SEQ ID NO: 6283 - DNA, 10 bp, Artificial Sequence
  Synthetic Sequence
ctgcatcggg

SEQ ID NO: 6284 - DNA, 10 bp, Artificial Sequence
  Synthetic Sequence
gaaagtacag

SEQ ID NO: 6285 - DNA, 10 bp, Artificial Sequence
  Synthetic Sequence
cccgaggctt

SEQ ID NO: 6286 - DNA, 10 bp, Artificial Sequence
  Synthetic Sequence
gaacatcgtt

SEQ ID NO: 6287 - DNA, 10 bp, Artificial Sequence
  Synthetic Sequence
tacttgtctg

SEQ ID NO: 6288 - DNA, 10 bp, Artificial Sequence
  Synthetic Sequence
gacatctctg

SEQ ID NO: 6289 - DNA, 10 bp, Artificial Sequence
  Synthetic Sequence
tcccacattt

SEQ ID NO: 6290 - DNA, 10 bp, Artificial Sequence
  Synthetic Sequence
cctttaacct

SEQ ID NO: 6291 - DNA, 10 bp, Artificial Sequence
  Synthetic Sequence
caatatcggc

SEQ ID NO: 6292 - DNA, 10 bp, Artificial Sequence
  Synthetic Sequence
aactactgaa

SEQ ID NO: 6293 - DNA, 10 bp, Artificial Sequence
  Synthetic Sequence
agatgcagga

SEQ ID NO: 6294 - DNA, 10 bp, Artificial Sequence
  Synthetic Sequence
tctagggcga

SEQ ID NO: 6295 - DNA, 10 bp, Artificial Sequence
  Synthetic Sequence
ctagtctgac

SEQ ID NO: 6296 - DNA, 10 bp, Artificial Sequence
  Synthetic Sequence
gagtactttc

SEQ ID NO: 6297 - DNA, 10 bp, Artificial Sequence
  Synthetic Sequence
acaccagatc

SEQ ID NO: 6298 - DNA, 10 bp, Artificial Sequence
  Synthetic Sequence
atatggatgc

SEQ ID NO: 6299 - DNA, 10 bp, Artificial Sequence
  Synthetic Sequence
gaaacatcct

SEQ ID NO: 6300 - DNA, 10 bp, Artificial Sequence
  Synthetic Sequence
aagatttact

SEQ ID NO: 6301 - DNA, 10 bp, Artificial Sequence
  Synthetic Sequence
cgtcttacga

SEQ ID NO: 6302 - DNA, 10 bp, Artificial Sequence
  Synthetic Sequence
gtccctaaag

SEQ ID NO: 6303 - DNA, 10 bp, Artificial Sequence
  Synthetic Sequence
gatccggaat

SEQ ID NO: 6304 - DNA, 10 bp, Artificial Sequence
  Synthetic Sequence
caccaacgat

SEQ ID NO: 6305 - DNA, 10 bp, Artificial Sequence
  Synthetic Sequence
agcgtgtatg

SEQ ID NO: 6306 - DNA, 10 bp, Artificial Sequence
  Synthetic Sequence
gagggaccct

SEQ ID NO: 6307 - DNA, 10 bp, Artificial Sequence
  Synthetic Sequence
cgcaatggct

SEQ ID NO: 6308 - DNA, 10 bp, Artificial Sequence
  Synthetic Sequence
tgcgtaccta

SEQ ID NO: 6309 - DNA, 10 bp, Artificial Sequence
  Synthetic Sequence
ctgcctaacc

SEQ ID NO: 6310 - DNA, 10 bp, Artificial Sequence
  Synthetic Sequence
tcatggaggt

SEQ ID NO: 6311 - DNA, 10 bp, Artificial Sequence
  Synthetic Sequence
tgcagttgct

SEQ ID NO: 6312 - DNA, 10 bp, Artificial Sequence
  Synthetic Sequence
gcaatagcac

SEQ ID NO: 6313 - DNA, 10 bp, Artificial Sequence
  Synthetic Sequence
ccgatgtggc

SEQ ID NO: 6314 - DNA, 10 bp, Artificial Sequence
  Synthetic Sequence
actactgatt

SEQ ID NO: 6315 - DNA, 10 bp, Artificial Sequence
  Synthetic Sequence
gatcaggatc

SEQ ID NO: 6316 - DNA, 10 bp, Artificial Sequence
  Synthetic Sequence
gcaaaggctt

SEQ ID NO: 6317 - DNA, 10 bp, Artificial Sequence
  Synthetic Sequence
agctcttccg

SEQ ID NO: 6318 - DNA, 10 bp, Artificial Sequence
  Synthetic Sequence
tcacgactag

SEQ ID NO: 6319 - DNA, 10 bp, Artificial Sequence
  Synthetic Sequence
cggaggagtt

SEQ ID NO: 6320 - DNA, 10 bp, Artificial Sequence
  Synthetic Sequence
ttgggagatc

SEQ ID NO: 6321 - DNA, 10 bp, Artificial Sequence
  Synthetic Sequence
gttcacagat

SEQ ID NO: 6322 - DNA, 10 bp, Artificial Sequence
  Synthetic Sequence
gaacagcacc

SEQ ID NO: 6323 - DNA, 10 bp, Artificial Sequence
  Synthetic Sequence
catatcctgg

SEQ ID NO: 6324 - DNA, 10 bp, Artificial Sequence
  Synthetic Sequence
tccaactcta

SEQ ID NO: 6325 - DNA, 10 bp, Artificial Sequence
  Synthetic Sequence
cccgaatgtc

SEQ ID NO: 6326 - DNA, 10 bp, Artificial Sequence
  Synthetic Sequence
gcctcgagat

SEQ ID NO: 6327 - DNA, 10 bp, Artificial Sequence
  Synthetic Sequence
taggagacgt

SEQ ID NO: 6328 - DNA, 10 bp, Artificial Sequence
  Synthetic Sequence
gaaattattt

SEQ ID NO: 6329 - DNA, 10 bp, Artificial Sequence
  Synthetic Sequence
tcgcactccc

SEQ ID NO: 6330 - DNA, 10 bp, Artificial Sequence
  Synthetic Sequence
catgaccggt

SEQ ID NO: 6331 - DNA, 10 bp, Artificial Sequence
  Synthetic Sequence
gcgtctctta

SEQ ID NO: 6332 - DNA, 10 bp, Artificial Sequence
  Synthetic Sequence
attagtgcca

SEQ ID NO: 6333 - DNA, 10 bp, Artificial Sequence
  Synthetic Sequence
cataaattcg

SEQ ID NO: 6334 - DNA, 10 bp, Artificial Sequence
  Synthetic Sequence
agattcatgg

SEQ ID NO: 6335 - DNA, 10 bp, Artificial Sequence
  Synthetic Sequence
gggtcatggc

SEQ ID NO: 6336 - DNA, 10 bp, Artificial Sequence
  Synthetic Sequence
gtgaatttgt

SEQ ID NO: 6337 - DNA, 10 bp, Artificial Sequence
  Synthetic Sequence
taactggaat

SEQ ID NO: 6338 - DNA, 10 bp, Artificial Sequence
  Synthetic Sequence
taggccatgc

SEQ ID NO: 6339 - DNA, 10 bp, Artificial Sequence
  Synthetic Sequence
tgtaattacg

SEQ ID NO: 6340 - DNA, 10 bp, Artificial Sequence
  Synthetic Sequence
cctgcgatgc

SEQ ID NO: 6341 - DNA, 10 bp, Artificial Sequence
  Synthetic Sequence
tggtgcaaga

SEQ ID NO: 6342 - DNA, 10 bp, Artificial Sequence
  Synthetic Sequence
aaaggtgcgg

SEQ ID NO: 6343 - DNA, 10 bp, Artificial Sequence
  Synthetic Sequence
agagttcctg

SEQ ID NO: 6344 - DNA, 10 bp, Artificial Sequence
  Synthetic Sequence
cgaccacacc

SEQ ID NO: 6345 - DNA, 10 bp, Artificial Sequence
  Synthetic Sequence
aaaggatcat

SEQ ID NO: 6346 - DNA, 10 bp, Artificial Sequence
  Synthetic Sequence
cctctaaagc

SEQ ID NO: 6347 - DNA, 10 bp, Artificial Sequence
  Synthetic Sequence
cgaggctcac

SEQ ID NO: 6348 - DNA, 10 bp, Artificial Sequence
  Synthetic Sequence
gatcctcacc

SEQ ID NO: 6349 - DNA, 10 bp, Artificial Sequence
  Synthetic Sequence
gacgtgtgaa

SEQ ID NO: 6350 - DNA, 10 bp, Artificial Sequence
  Synthetic Sequence
acagcgaatc

SEQ ID NO: 6351 - DNA, 10 bp, Artificial Sequence
  Synthetic Sequence
gtttagggtc

SEQ ID NO: 6352 - DNA, 10 bp, Artificial Sequence
  Synthetic Sequence
tccagagcgc

SEQ ID NO: 6353 - DNA, 10 bp, Artificial Sequence
  Synthetic Sequence
atccgctacc

SEQ ID NO: 6354 - DNA, 10 bp, Artificial Sequence
  Synthetic Sequence
agttctcacc

SEQ ID NO: 6355 - DNA, 10 bp, Artificial Sequence
  Synthetic Sequence
acaatcggtt

SEQ ID NO: 6356 - DNA, 10 bp, Artificial Sequence
  Synthetic Sequence
cgatacttgc

SEQ ID NO: 6357 - DNA, 10 bp, Artificial Sequence
  Synthetic Sequence
tatctataat

SEQ ID NO: 6358 - DNA, 10 bp, Artificial Sequence
  Synthetic Sequence
cgcgttgaat

SEQ ID NO: 6359 - DNA, 10 bp, Artificial Sequence
  Synthetic Sequence
ctcgctttac

SEQ ID NO: 6360 - DNA, 10 bp, Artificial Sequence
  Synthetic Sequence
ctatttagga

SEQ ID NO: 6361 - DNA, 10 bp, Artificial Sequence
  Synthetic Sequence
atagtggtat

SEQ ID NO: 6362 - DNA, 10 bp, Artificial Sequence
  Synthetic Sequence
tgtgtctact

SEQ ID NO: 6363 - DNA, 10 bp, Artificial Sequence
  Synthetic Sequence
actgtcttta

SEQ ID NO: 6364 - DNA, 10 bp, Artificial Sequence
  Synthetic Sequence
gagttcccaa

SEQ ID NO: 6365 - DNA, 10 bp, Artificial Sequence
  Synthetic Sequence
gcatgtcttc

SEQ ID NO: 6366 - DNA, 10 bp, Artificial Sequence
  Synthetic Sequence
agagtgacga

SEQ ID NO: 6367 - DNA, 10 bp, Artificial Sequence
  Synthetic Sequence
gagcgaccag

SEQ ID NO: 6368 - DNA, 10 bp, Artificial Sequence
  Synthetic Sequence
gcgctgtata

SEQ ID NO: 6369 - DNA, 10 bp, Artificial Sequence
  Synthetic Sequence
agctgtatct

SEQ ID NO: 6370 - DNA, 10 bp, Artificial Sequence
  Synthetic Sequence
tgcggagagc

SEQ ID NO: 6371 - DNA, 10 bp, Artificial Sequence
  Synthetic Sequence
accatgcggg

SEQ ID NO: 6372 - DNA, 10 bp, Artificial Sequence
  Synthetic Sequence
gttccggcag

SEQ ID NO: 6373 - DNA, 10 bp, Artificial Sequence
  Synthetic Sequence
cgacgtagag

SEQ ID NO: 6374 - DNA, 10 bp, Artificial Sequence
  Synthetic Sequence
ctcgctggaa

SEQ ID NO: 6375 - DNA, 10 bp, Artificial Sequence
  Synthetic Sequence
tcttcaatct

SEQ ID NO: 6376 - DNA, 10 bp, Artificial Sequence
  Synthetic Sequence
acgacgtact

SEQ ID NO: 6377 - DNA, 10 bp, Artificial Sequence
  Synthetic Sequence
atgactccaa

SEQ ID NO: 6378 - DNA, 10 bp, Artificial Sequence
  Synthetic Sequence
tagttacatg

SEQ ID NO: 6379 - DNA, 10 bp, Artificial Sequence
  Synthetic Sequence
cggtgccaca

SEQ ID NO: 6380 - DNA, 10 bp, Artificial Sequence
  Synthetic Sequence
cagtcttgtg

SEQ ID NO: 6381 - DNA, 10 bp, Artificial Sequence
  Synthetic Sequence
ctctgtaggc

SEQ ID NO: 6382 - DNA, 10 bp, Artificial Sequence
  Synthetic Sequence
tgacccaaca

SEQ ID NO: 6383 - DNA, 10 bp, Artificial Sequence
  Synthetic Sequence
agtgaacagt

SEQ ID NO: 6384 - DNA, 10 bp, Artificial Sequence
  Synthetic Sequence
tcaaatccac

SEQ ID NO: 6385 - DNA, 10 bp, Artificial Sequence
  Synthetic Sequence
cctaggtggt

SEQ ID NO: 6386 - DNA, 10 bp, Artificial Sequence
  Synthetic Sequence
ggacgccatt

SEQ ID NO: 6387 - DNA, 10 bp, Artificial Sequence
  Synthetic Sequence
aaagagatgt

SEQ ID NO: 6388 - DNA, 10 bp, Artificial Sequence
  Synthetic Sequence
agcgtccata

SEQ ID NO: 6389 - DNA, 10 bp, Artificial Sequence
  Synthetic Sequence
tacgcctgtt

SEQ ID NO: 6390 - DNA, 10 bp, Artificial Sequence
  Synthetic Sequence
taacagtcaa

SEQ ID NO: 6391 - DNA, 10 bp, Artificial Sequence
  Synthetic Sequence
ctgcttatgc

SEQ ID NO: 6392 - DNA, 10 bp, Artificial Sequence
  Synthetic Sequence
gcagcgactt

SEQ ID NO: 6393 - DNA, 10 bp, Artificial Sequence
  Synthetic Sequence
aagaaagaaa

SEQ ID NO: 6394 - DNA, 10 bp, Artificial Sequence
  Synthetic Sequence
cgacctaaac

SEQ ID NO: 6395 - DNA, 10 bp, Artificial Sequence
  Synthetic Sequence
cttgagagat

SEQ ID NO: 6396 - DNA, 10 bp, Artificial Sequence
  Synthetic Sequence
atgtggacca

SEQ ID NO: 6397 - DNA, 10 bp, Artificial Sequence
  Synthetic Sequence
tgactatatc

SEQ ID NO: 6398 - DNA, 10 bp, Artificial Sequence
  Synthetic Sequence
accgcacgac

SEQ ID NO: 6399 - DNA, 10 bp, Artificial Sequence
  Synthetic Sequence
ccgagcttgg

SEQ ID NO: 6400 - DNA, 10 bp, Artificial Sequence
  Synthetic Sequence
gctaagtcta

SEQ ID NO: 6401 - DNA, 10 bp, Artificial Sequence
  Synthetic Sequence
gcttatgtag

SEQ ID NO: 6402 - DNA, 10 bp, Artificial Sequence
  Synthetic Sequence
cgctattctt

SEQ ID NO: 6403 - DNA, 10 bp, Artificial Sequence
  Synthetic Sequence
tgatttgtca

SEQ ID NO: 6404 - DNA, 10 bp, Artificial Sequence
  Synthetic Sequence
ggcaatctaa

SEQ ID NO: 6405 - DNA, 10 bp, Artificial Sequence
  Synthetic Sequence
tacacactcc

SEQ ID NO: 6406 - DNA, 10 bp, Artificial Sequence
  Synthetic Sequence
attcacttcg

SEQ ID NO: 6407 - DNA, 10 bp, Artificial Sequence
  Synthetic Sequence
gcacgtggaa

SEQ ID NO: 6408 - DNA, 10 bp, Artificial Sequence
  Synthetic Sequence
cgatccggtt

SEQ ID NO: 6409 - DNA, 10 bp, Artificial Sequence
  Synthetic Sequence
agatgtcatt

SEQ ID NO: 6410 - DNA, 10 bp, Artificial Sequence
  Synthetic Sequence
ggctccgaag

SEQ ID NO: 6411 - DNA, 10 bp, Artificial Sequence
  Synthetic Sequence
aggcgtggag

SEQ ID NO: 6412 - DNA, 10 bp, Artificial Sequence
  Synthetic Sequence
cgcatcggtc

SEQ ID NO: 6413 - DNA, 10 bp, Artificial Sequence
  Synthetic Sequence
gagataatga

SEQ ID NO: 6414 - DNA, 10 bp, Artificial Sequence
  Synthetic Sequence
attcatggtt

SEQ ID NO: 6415 - DNA, 10 bp, Artificial Sequence
  Synthetic Sequence
ggtcattagc

SEQ ID NO: 6416 - DNA, 10 bp, Artificial Sequence
  Synthetic Sequence
tatccacgcg

SEQ ID NO: 6417 - DNA, 10 bp, Artificial Sequence
  Synthetic Sequence
caaagttcct

SEQ ID NO: 6418 - DNA, 10 bp, Artificial Sequence
  Synthetic Sequence
ccaagcgcct

SEQ ID NO: 6419 - DNA, 10 bp, Artificial Sequence
  Synthetic Sequence
tatatcatca

SEQ ID NO: 6420 - DNA, 10 bp, Artificial Sequence
  Synthetic Sequence
gccgacacat

SEQ ID NO: 6421 - DNA, 10 bp, Artificial Sequence
  Synthetic Sequence
catagtgtgc

SEQ ID NO: 6422 - DNA, 10 bp, Artificial Sequence
  Synthetic Sequence
cagcccaagg

SEQ ID NO: 6423 - DNA, 10 bp, Artificial Sequence
  Synthetic Sequence
ttcattgtca

SEQ ID NO: 6424 - DNA, 10 bp, Artificial Sequence
  Synthetic Sequence
gacaagtccc

SEQ ID NO: 6425 - DNA, 10 bp, Artificial Sequence
  Synthetic Sequence
acggcgtgat

SEQ ID NO: 6426 - DNA, 10 bp, Artificial Sequence
  Synthetic Sequence
tttatactca

SEQ ID NO: 6427 - DNA, 10 bp, Artificial Sequence
  Synthetic Sequence
gaagatcaga

SEQ ID NO: 6428 - DNA, 10 bp, Artificial Sequence
  Synthetic Sequence
acccttatcc

SEQ ID NO: 6429 - DNA, 10 bp, Artificial Sequence
  Synthetic Sequence
gcgtgtcacg

SEQ ID NO: 6430 - DNA, 10 bp, Artificial Sequence
  Synthetic Sequence
ggaattgttg

SEQ ID NO: 6431 - DNA, 10 bp, Artificial Sequence
  Synthetic Sequence
ggcaggtcat

SEQ ID NO: 6432 - DNA, 10 bp, Artificial Sequence
  Synthetic Sequence
agattgctac

SEQ ID NO: 6433 - DNA, 10 bp, Artificial Sequence
  Synthetic Sequence
aagtactcgt

SEQ ID NO: 6434 - DNA, 10 bp, Artificial Sequence
  Synthetic Sequence
cagttatgac

SEQ ID NO: 6435 - DNA, 10 bp, Artificial Sequence
  Synthetic Sequence
gctcccaatt

SEQ ID NO: 6436 - DNA, 10 bp, Artificial Sequence
  Synthetic Sequence
cgcagatcaa

SEQ ID NO: 6437 - DNA, 10 bp, Artificial Sequence
  Synthetic Sequence
gaaggatgca

SEQ ID NO: 6438 - DNA, 10 bp, Artificial Sequence
  Synthetic Sequence
ttctccgcgt

SEQ ID NO: 6439 - DNA, 10 bp, Artificial Sequence
  Synthetic Sequence
aatgacaggc

SEQ ID NO: 6440 - DNA, 10 bp, Artificial Sequence
  Synthetic Sequence
gtccctttct

SEQ ID NO: 6441 - DNA, 10 bp, Artificial Sequence
  Synthetic Sequence
gttaatcaga

SEQ ID NO: 6442 - DNA, 10 bp, Artificial Sequence
  Synthetic Sequence
tccttcgttg

SEQ ID NO: 6443 - DNA, 10 bp, Artificial Sequence
  Synthetic Sequence
actcgaaact

SEQ ID NO: 6444 - DNA, 10 bp, Artificial Sequence
  Synthetic Sequence
gtccgtgtcc

SEQ ID NO: 6445 - DNA, 10 bp, Artificial Sequence
  Synthetic Sequence
tatagacgat

SEQ ID NO: 6446 - DNA, 10 bp, Artificial Sequence
  Synthetic Sequence
tgacgccagc

SEQ ID NO: 6447 - DNA, 10 bp, Artificial Sequence
  Synthetic Sequence
ccaacaaggc

SEQ ID NO: 6448 - DNA, 10 bp, Artificial Sequence
  Synthetic Sequence
ttagccatcc

SEQ ID NO: 6449 - DNA, 10 bp, Artificial Sequence
  Synthetic Sequence
acgtgataaa

SEQ ID NO: 6450 - DNA, 10 bp, Artificial Sequence
  Synthetic Sequence
gactgctaat

SEQ ID NO: 6451 - DNA, 10 bp, Artificial Sequence
  Synthetic Sequence
gataaacggc

SEQ ID NO: 6452 - DNA, 10 bp, Artificial Sequence
  Synthetic Sequence
agagaacgat

SEQ ID NO: 6453 - DNA, 10 bp, Artificial Sequence
  Synthetic Sequence
cgctccgtac

SEQ ID NO: 6454 - DNA, 10 bp, Artificial Sequence
  Synthetic Sequence
gcgaacagat

SEQ ID NO: 6455 - DNA, 10 bp, Artificial Sequence
  Synthetic Sequence
cgactcacac

SEQ ID NO: 6456 - DNA, 10 bp, Artificial Sequence
  Synthetic Sequence
tggacgatgt

SEQ ID NO: 6457 - DNA, 10 bp, Artificial Sequence
  Synthetic Sequence
gcaagcatat

SEQ ID NO: 6458 - DNA, 10 bp, Artificial Sequence
  Synthetic Sequence
gtacaaaggg

SEQ ID NO: 6459 - DNA, 10 bp, Artificial Sequence
  Synthetic Sequence
gaatttcaaa

SEQ ID NO: 6460 - DNA, 10 bp, Artificial Sequence
  Synthetic Sequence
ttcacagaga

SEQ ID NO: 6461 - DNA, 10 bp, Artificial Sequence
  Synthetic Sequence
ggacttgagc

SEQ ID NO: 6462 - DNA, 10 bp, Artificial Sequence
  Synthetic Sequence
tataattcgt

SEQ ID NO: 6463 - DNA, 10 bp, Artificial Sequence
  Synthetic Sequence
agtactattt

SEQ ID NO: 6464 - DNA, 10 bp, Artificial Sequence
  Synthetic Sequence
ccgctgtact

SEQ ID NO: 6465 - DNA, 10 bp, Artificial Sequence
  Synthetic Sequence
cacggtctgg

SEQ ID NO: 6466 - DNA, 10 bp, Artificial Sequence
  Synthetic Sequence
cggcattacg

SEQ ID NO: 6467 - DNA, 10 bp, Artificial Sequence
  Synthetic Sequence
aggcgttgga

SEQ ID NO: 6468 - DNA, 10 bp, Artificial Sequence
  Synthetic Sequence
tgtttgcgga

SEQ ID NO: 6469 - DNA, 10 bp, Artificial Sequence
  Synthetic Sequence
gagggcgttg

SEQ ID NO: 6470 - DNA, 10 bp, Artificial Sequence
  Synthetic Sequence
cattcagccc

SEQ ID NO: 6471 - DNA, 10 bp, Artificial Sequence
  Synthetic Sequence
cgtctccggt

SEQ ID NO: 6472 - DNA, 10 bp, Artificial Sequence
  Synthetic Sequence
ctgtgtgtac

SEQ ID NO: 6473 - DNA, 10 bp, Artificial Sequence
  Synthetic Sequence
ttcatatgtg

SEQ ID NO: 6474 - DNA, 10 bp, Artificial Sequence
  Synthetic Sequence
taatgtactc

SEQ ID NO: 6475 - DNA, 10 bp, Artificial Sequence
  Synthetic Sequence
ttgtgataat

SEQ ID NO: 6476 - DNA, 10 bp, Artificial Sequence
  Synthetic Sequence
gtatcctaac

SEQ ID NO: 6477 - DNA, 10 bp, Artificial Sequence
  Synthetic Sequence
ccaatcggcg

SEQ ID NO: 6478 - DNA, 10 bp, Artificial Sequence
  Synthetic Sequence
tactgttgaa

SEQ ID NO: 6479 - DNA, 10 bp, Artificial Sequence
  Synthetic Sequence
tcggctgaca

SEQ ID NO: 6480 - DNA, 10 bp, Artificial Sequence
  Synthetic Sequence
ttgtaccctg

SEQ ID NO: 6481 - DNA, 10 bp, Artificial Sequence
  Synthetic Sequence
ctaagaagtc

SEQ ID NO: 6482 - DNA, 10 bp, Artificial Sequence
  Synthetic Sequence
tgtcgtataa

SEQ ID NO: 6483 - DNA, 10 bp, Artificial Sequence
  Synthetic Sequence
cggaccgagt

SEQ ID NO: 6484 - DNA, 10 bp, Artificial Sequence
  Synthetic Sequence
taaacccggg

SEQ ID NO: 6485 - DNA, 10 bp, Artificial Sequence
  Synthetic Sequence
taactcgctg

SEQ ID NO: 6486 - DNA, 10 bp, Artificial Sequence
  Synthetic Sequence
cgctaagagg

SEQ ID NO: 6487 - DNA, 10 bp, Artificial Sequence
  Synthetic Sequence
tctaagtgac

SEQ ID NO: 6488 - DNA, 10 bp, Artificial Sequence
  Synthetic Sequence
cggttattag

SEQ ID NO: 6489 - DNA, 10 bp, Artificial Sequence
  Synthetic Sequence
actgcggcat

SEQ ID NO: 6490 - DNA, 10 bp, Artificial Sequence
  Synthetic Sequence
tgcttacgcc

SEQ ID NO: 6491 - DNA, 10 bp, Artificial Sequence
  Synthetic Sequence
tgcctctcct

SEQ ID NO: 6492 - DNA, 10 bp, Artificial Sequence
  Synthetic Sequence
cttacccatc

SEQ ID NO: 6493 - DNA, 10 bp, Artificial Sequence
  Synthetic Sequence
tcagactgcc

SEQ ID NO: 6494 - DNA, 10 bp, Artificial Sequence
  Synthetic Sequence
aagagtgcat

SEQ ID NO: 6495 - DNA, 10 bp, Artificial Sequence
  Synthetic Sequence
tgttgtccca

SEQ ID NO: 6496 - DNA, 10 bp, Artificial Sequence
  Synthetic Sequence
tcgcctttaa

SEQ ID NO: 6497 - DNA, 10 bp, Artificial Sequence
  Synthetic Sequence
ctcctagagc

SEQ ID NO: 6498 - DNA, 10 bp, Artificial Sequence
  Synthetic Sequence
ccactactca

SEQ ID NO: 6499 - DNA, 10 bp, Artificial Sequence
  Synthetic Sequence
atgaaaccgt

SEQ ID NO: 6500 - DNA, 10 bp, Artificial Sequence
  Synthetic Sequence
attgggcgtt

SEQ ID NO: 6501 - DNA, 10 bp, Artificial Sequence
  Synthetic Sequence
gtcgctcgct

SEQ ID NO: 6502 - DNA, 10 bp, Artificial Sequence
  Synthetic Sequence
cggctatacc

SEQ ID NO: 6503 - DNA, 10 bp, Artificial Sequence
  Synthetic Sequence
acgcaacacc

SEQ ID NO: 6504 - DNA, 10 bp, Artificial Sequence
  Synthetic Sequence
agtcaagcgt

SEQ ID NO: 6505 - DNA, 10 bp, Artificial Sequence
  Synthetic Sequence
tgacgctccc

SEQ ID NO: 6506 - DNA, 10 bp, Artificial Sequence
  Synthetic Sequence
caacgaatga

SEQ ID NO: 6507 - DNA, 10 bp, Artificial Sequence
  Synthetic Sequence
tgtgcccttt

SEQ ID NO: 6508 - DNA, 10 bp, Artificial Sequence
  Synthetic Sequence
cgatctactt

SEQ ID NO: 6509 - DNA, 10 bp, Artificial Sequence
  Synthetic Sequence
ccgctacgac

SEQ ID NO: 6510 - DNA, 10 bp, Artificial Sequence
  Synthetic Sequence
ttgcaatatc

SEQ ID NO: 6511 - DNA, 10 bp, Artificial Sequence
  Synthetic Sequence
gaggttccca

SEQ ID NO: 6512 - DNA, 10 bp, Artificial Sequence
  Synthetic Sequence
ccaaaggtat

SEQ ID NO: 6513 - DNA, 10 bp, Artificial Sequence
  Synthetic Sequence
cggcttcttt

SEQ ID NO: 6514 - DNA, 10 bp, Artificial Sequence
  Synthetic Sequence
aattcaaaca

SEQ ID NO: 6515 - DNA, 10 bp, Artificial Sequence
  Synthetic Sequence
ttcactccag

SEQ ID NO: 6516 - DNA, 10 bp, Artificial Sequence
  Synthetic Sequence
tcgtcaacac

SEQ ID NO: 6517 - DNA, 10 bp, Artificial Sequence
  Synthetic Sequence
taccttcgtt

SEQ ID NO: 6518 - DNA, 10 bp, Artificial Sequence
  Synthetic Sequence
cgctacaccg

SEQ ID NO: 6519 - DNA, 10 bp, Artificial Sequence
  Synthetic Sequence
atactcagca

SEQ ID NO: 6520 - DNA, 10 bp, Artificial Sequence
  Synthetic Sequence
agagacggac

SEQ ID NO: 6521 - DNA, 10 bp, Artificial Sequence
  Synthetic Sequence
ccacaatggg

SEQ ID NO: 6522 - DNA, 10 bp, Artificial Sequence
  Synthetic Sequence
catgcggttc

SEQ ID NO: 6523 - DNA, 10 bp, Artificial Sequence
  Synthetic Sequence
gttcctacta

SEQ ID NO: 6524 - DNA, 10 bp, Artificial Sequence
  Synthetic Sequence
gagcatcatc

SEQ ID NO: 6525 - DNA, 10 bp, Artificial Sequence
  Synthetic Sequence
gccgcattgt

SEQ ID NO: 6526 - DNA, 10 bp, Artificial Sequence
  Synthetic Sequence
gatgaacagg

SEQ ID NO: 6527 - DNA, 10 bp, Artificial Sequence
  Synthetic Sequence
atgctcaggg

SEQ ID NO: 6528 - DNA, 10 bp, Artificial Sequence
  Synthetic Sequence
cctagcgaga

SEQ ID NO: 6529 - DNA, 10 bp, Artificial Sequence
  Synthetic Sequence
ccacttgcag

SEQ ID NO: 6530 - DNA, 10 bp, Artificial Sequence
  Synthetic Sequence
tgcagaagag

SEQ ID NO: 6531 - DNA, 10 bp, Artificial Sequence
  Synthetic Sequence
tggtcgatta

SEQ ID NO: 6532 - DNA, 10 bp, Artificial Sequence
  Synthetic Sequence
gcaatattcg

SEQ ID NO: 6533 - DNA, 10 bp, Artificial Sequence
  Synthetic Sequence
gggctcgtag

SEQ ID NO: 6534 - DNA, 10 bp, Artificial Sequence
  Synthetic Sequence
gataactacg

SEQ ID NO: 6535 - DNA, 10 bp, Artificial Sequence
  Synthetic Sequence
ggctcggttg

SEQ ID NO: 6536 - DNA, 10 bp, Artificial Sequence
  Synthetic Sequence
attcatatga

SEQ ID NO: 6537 - DNA, 10 bp, Artificial Sequence
  Synthetic Sequence
gacttgccgg

SEQ ID NO: 6538 - DNA, 10 bp, Artificial Sequence
  Synthetic Sequence
ttcgagtggt

SEQ ID NO: 6539 - DNA, 10 bp, Artificial Sequence
  Synthetic Sequence
tgacccattt

SEQ ID NO: 6540 - DNA, 10 bp, Artificial Sequence
  Synthetic Sequence
gcgcatacta

SEQ ID NO: 6541 - DNA, 10 bp, Artificial Sequence
  Synthetic Sequence
cgttgacgcg

SEQ ID NO: 6542 - DNA, 10 bp, Artificial Sequence
  Synthetic Sequence
gccgatcgac

SEQ ID NO: 6543 - DNA, 10 bp, Artificial Sequence
  Synthetic Sequence
attgcctagt

SEQ ID NO: 6544 - DNA, 10 bp, Artificial Sequence
  Synthetic Sequence
ctgaacccgg

SEQ ID NO: 6545 - DNA, 10 bp, Artificial Sequence
  Synthetic Sequence
ttaggttctc

SEQ ID NO: 6546 - DNA, 10 bp, Artificial Sequence
  Synthetic Sequence
tggcaggcct

SEQ ID NO: 6547 - DNA, 10 bp, Artificial Sequence
  Synthetic Sequence
ttgtttggtt

SEQ ID NO: 6548 - DNA, 10 bp, Artificial Sequence
  Synthetic Sequence
agtaaagatg

SEQ ID NO: 6549 - DNA, 10 bp, Artificial Sequence
  Synthetic Sequence
ccaagtaaga

SEQ ID NO: 6550 - DNA, 10 bp, Artificial Sequence
  Synthetic Sequence
atagatcaag

SEQ ID NO: 6551 - DNA, 10 bp, Artificial Sequence
  Synthetic Sequence
ggatggtgga

SEQ ID NO: 6552 - DNA, 10 bp, Artificial Sequence
  Synthetic Sequence
tggcctgtta

SEQ ID NO: 6553 - DNA, 10 bp, Artificial Sequence
  Synthetic Sequence
aagggccgag

SEQ ID NO: 6554 - DNA, 10 bp, Artificial Sequence
  Synthetic Sequence
ataaacgtat

SEQ ID NO: 6555 - DNA, 10 bp, Artificial Sequence
  Synthetic Sequence
tattgagtgg

SEQ ID NO: 6556 - DNA, 10 bp, Artificial Sequence
  Synthetic Sequence
agcctagtcc

SEQ ID NO: 6557 - DNA, 10 bp, Artificial Sequence
  Synthetic Sequence
cgacgatgga

SEQ ID NO: 6558 - DNA, 10 bp, Artificial Sequence
  Synthetic Sequence
atgggacggg

SEQ ID NO: 6559 - DNA, 10 bp, Artificial Sequence
  Synthetic Sequence
tctcctaact

SEQ ID NO: 6560 - DNA, 10 bp, Artificial Sequence
  Synthetic Sequence
ggaatttaag

SEQ ID NO: 6561 - DNA, 10 bp, Artificial Sequence
  Synthetic Sequence
aattacaacc

SEQ ID NO: 6562 - DNA, 10 bp, Artificial Sequence
  Synthetic Sequence
tcctccaatg

SEQ ID NO: 6563 - DNA, 10 bp, Artificial Sequence
  Synthetic Sequence
tgtctaaatt

SEQ ID NO: 6564 - DNA, 10 bp, Artificial Sequence
  Synthetic Sequence
cgctcaggct

SEQ ID NO: 6565 - DNA, 10 bp, Artificial Sequence
  Synthetic Sequence
tcttactaaa

SEQ ID NO: 6566 - DNA, 10 bp, Artificial Sequence
  Synthetic Sequence
atcggcccag

SEQ ID NO: 6567 - DNA, 10 bp, Artificial Sequence
  Synthetic Sequence
gtgacttcgg

SEQ ID NO: 6568 - DNA, 10 bp, Artificial Sequence
  Synthetic Sequence
tgcataaggt

SEQ ID NO: 6569 - DNA, 10 bp, Artificial Sequence
  Synthetic Sequence
ctgcttccaa

SEQ ID NO: 6570 - DNA, 10 bp, Artificial Sequence
  Synthetic Sequence
tccatctttc

SEQ ID NO: 6571 - DNA, 10 bp, Artificial Sequence
  Synthetic Sequence
atagcaaagc

SEQ ID NO: 6572 - DNA, 10 bp, Artificial Sequence
  Synthetic Sequence
cctaggcgca

SEQ ID NO: 6573 - DNA, 10 bp, Artificial Sequence
  Synthetic Sequence
cgaccagaaa

SEQ ID NO: 6574 - DNA, 10 bp, Artificial Sequence
  Synthetic Sequence
atcctgttta

SEQ ID NO: 6575 - DNA, 10 bp, Artificial Sequence
  Synthetic Sequence
tatcacggac

SEQ ID NO: 6576 - DNA, 10 bp, Artificial Sequence
  Synthetic Sequence
ccttcgccgt

SEQ ID NO: 6577 - DNA, 10 bp, Artificial Sequence
  Synthetic Sequence
ctaccggtag

SEQ ID NO: 6578 - DNA, 10 bp, Artificial Sequence
  Synthetic Sequence
ccgaggttct

SEQ ID NO: 6579 - DNA, 10 bp, Artificial Sequence
  Synthetic Sequence
aatgtgatgg

SEQ ID NO: 6580 - DNA, 10 bp, Artificial Sequence
  Synthetic Sequence
ttcctcctta

SEQ ID NO: 6581 - DNA, 10 bp, Artificial Sequence
  Synthetic Sequence
gagagcgatc

SEQ ID NO: 6582 - DNA, 10 bp, Artificial Sequence
  Synthetic Sequence
ttccggtcgg

SEQ ID NO: 6583 - DNA, 10 bp, Artificial Sequence
  Synthetic Sequence
ggaacaatgc

SEQ ID NO: 6584 - DNA, 10 bp, Artificial Sequence
  Synthetic Sequence
tcgcaagggt

SEQ ID NO: 6585 - DNA, 10 bp, Artificial Sequence
  Synthetic Sequence
attcgggctc

SEQ ID NO: 6586 - DNA, 10 bp, Artificial Sequence
  Synthetic Sequence
ttcgtgcggg

SEQ ID NO: 6587 - DNA, 10 bp, Artificial Sequence
  Synthetic Sequence
accaatttga

SEQ ID NO: 6588 - DNA, 10 bp, Artificial Sequence
  Synthetic Sequence
cactgttagg

SEQ ID NO: 6589 - DNA, 10 bp, Artificial Sequence
  Synthetic Sequence
aattcgggac

SEQ ID NO: 6590 - DNA, 10 bp, Artificial Sequence
  Synthetic Sequence
tctgatgaaa

SEQ ID NO: 6591 - DNA, 10 bp, Artificial Sequence
  Synthetic Sequence
gctgctgagg

SEQ ID NO: 6592 - DNA, 10 bp, Artificial Sequence
  Synthetic Sequence
gacgtccatg

SEQ ID NO: 6593 - DNA, 10 bp, Artificial Sequence
  Synthetic Sequence
taggcgcgtc

SEQ ID NO: 6594 - DNA, 10 bp, Artificial Sequence
  Synthetic Sequence
tttaccgcgc

SEQ ID NO: 6595 - DNA, 10 bp, Artificial Sequence
  Synthetic Sequence
atcagaatgc

SEQ ID NO: 6596 - DNA, 10 bp, Artificial Sequence
  Synthetic Sequence
agctcgtacc

SEQ ID NO: 6597 - DNA, 10 bp, Artificial Sequence
  Synthetic Sequence
tcatggaacg

SEQ ID NO: 6598 - DNA, 10 bp, Artificial Sequence
  Synthetic Sequence
gcgtcagtga

SEQ ID NO: 6599 - DNA, 10 bp, Artificial Sequence
  Synthetic Sequence
gaaccgcggt

SEQ ID NO: 6600 - DNA, 10 bp, Artificial Sequence
  Synthetic Sequence
gttcgtttac

SEQ ID NO: 6601 - DNA, 10 bp, Artificial Sequence
  Synthetic Sequence
cctgtcctcg

SEQ ID NO: 6602 - DNA, 10 bp, Artificial Sequence
  Synthetic Sequence
ataattcgga

SEQ ID NO: 6603 - DNA, 10 bp, Artificial Sequence
  Synthetic Sequence
ttacgccttt

SEQ ID NO: 6604 - DNA, 10 bp, Artificial Sequence
  Synthetic Sequence
tccaatccgg

SEQ ID NO: 6605 - DNA, 10 bp, Artificial Sequence
  Synthetic Sequence
tagacgaggg

SEQ ID NO: 6606 - DNA, 10 bp, Artificial Sequence
  Synthetic Sequence
ccgtgggtca

SEQ ID NO: 6607 - DNA, 10 bp, Artificial Sequence
  Synthetic Sequence
tgtaagaggc

SEQ ID NO: 6608 - DNA, 10 bp, Artificial Sequence
  Synthetic Sequence
actcaggtgc

SEQ ID NO: 6609 - DNA, 10 bp, Artificial Sequence
  Synthetic Sequence
gggctgttaa

SEQ ID NO: 6610 - DNA, 10 bp, Artificial Sequence
  Synthetic Sequence
acgttaggat

SEQ ID NO: 6611 - DNA, 10 bp, Artificial Sequence
  Synthetic Sequence
ctcggcgtag

SEQ ID NO: 6612 - DNA, 10 bp, Artificial Sequence
  Synthetic Sequence
tgcaaggcgt

SEQ ID NO: 6613 - DNA, 10 bp, Artificial Sequence
  Synthetic Sequence
ttccatccca

SEQ ID NO: 6614 - DNA, 10 bp, Artificial Sequence
  Synthetic Sequence
gcatgattta

SEQ ID NO: 6615 - DNA, 10 bp, Artificial Sequence
  Synthetic Sequence
tcgtgaatat

SEQ ID NO: 6616 - DNA, 10 bp, Artificial Sequence
  Synthetic Sequence
tgaggtcttt

SEQ ID NO: 6617 - DNA, 10 bp, Artificial Sequence
  Synthetic Sequence
ctgcgctgga

SEQ ID NO: 6618 - DNA, 10 bp, Artificial Sequence
  Synthetic Sequence
ttccgatagt

SEQ ID NO: 6619 - DNA, 10 bp, Artificial Sequence
  Synthetic Sequence
ttcacgctgt

SEQ ID NO: 6620 - DNA, 10 bp, Artificial Sequence
  Synthetic Sequence
acaaatgatc

SEQ ID NO: 6621 - DNA, 10 bp, Artificial Sequence
  Synthetic Sequence
cctcttgtct

SEQ ID NO: 6622 - DNA, 10 bp, Artificial Sequence
  Synthetic Sequence
tcggctatag

SEQ ID NO: 6623 - DNA, 10 bp, Artificial Sequence
  Synthetic Sequence
ggtgtgatgc

SEQ ID NO: 6624 - DNA, 10 bp, Artificial Sequence
  Synthetic Sequence
gtattgattc

SEQ ID NO: 6625 - DNA, 10 bp, Artificial Sequence
  Synthetic Sequence
tgctgcgact

SEQ ID NO: 6626 - DNA, 10 bp, Artificial Sequence
  Synthetic Sequence
gaaccctgac

SEQ ID NO: 6627 - DNA, 10 bp, Artificial Sequence
  Synthetic Sequence
caaacggtca

SEQ ID NO: 6628 - DNA, 10 bp, Artificial Sequence
  Synthetic Sequence
aggcaaacga

SEQ ID NO: 6629 - DNA, 10 bp, Artificial Sequence
  Synthetic Sequence
cggaaccaat

SEQ ID NO: 6630 - DNA, 10 bp, Artificial Sequence
  Synthetic Sequence
ggcttagtta

SEQ ID NO: 6631 - DNA, 10 bp, Artificial Sequence
  Synthetic Sequence
actccacgct

SEQ ID NO: 6632 - DNA, 10 bp, Artificial Sequence
  Synthetic Sequence
ggtcgacgaa

SEQ ID NO: 6633 - DNA, 10 bp, Artificial Sequence
  Synthetic Sequence
tgcctactgc

SEQ ID NO: 6634 - DNA, 10 bp, Artificial Sequence
  Synthetic Sequence
tggtcgccat

SEQ ID NO: 6635 - DNA, 10 bp, Artificial Sequence
  Synthetic Sequence
gcggtctatg

SEQ ID NO: 6636 - DNA, 10 bp, Artificial Sequence
  Synthetic Sequence
cttcccagta

SEQ ID NO: 6637 - DNA, 10 bp, Artificial Sequence
  Synthetic Sequence
cgtctcagcg

SEQ ID NO: 6638 - DNA, 10 bp, Artificial Sequence
  Synthetic Sequence
gttattaaac

SEQ ID NO: 6639 - DNA, 10 bp, Artificial Sequence
  Synthetic Sequence
gtccacccga

SEQ ID NO: 6640 - DNA, 10 bp, Artificial Sequence
  Synthetic Sequence
aactaaatat

SEQ ID NO: 6641 - DNA, 10 bp, Artificial Sequence
  Synthetic Sequence
aatcgaaccc

SEQ ID NO: 6642 - DNA, 10 bp, Artificial Sequence
  Synthetic Sequence
acgaggctgc

SEQ ID NO: 6643 - DNA, 10 bp, Artificial Sequence
  Synthetic Sequence
tggatcaaca

SEQ ID NO: 6644 - DNA, 10 bp, Artificial Sequence
  Synthetic Sequence
ccaccgggat

SEQ ID NO: 6645 - DNA, 10 bp, Artificial Sequence
  Synthetic Sequence
cgcggcaatc

SEQ ID NO: 6646 - DNA, 10 bp, Artificial Sequence
  Synthetic Sequence
cgtgtaccac

SEQ ID NO: 6647 - DNA, 10 bp, Artificial Sequence
  Synthetic Sequence
gcacacttgc

SEQ ID NO: 6648 - DNA, 10 bp, Artificial Sequence
  Synthetic Sequence
attacgaaat

SEQ ID NO: 6649 - DNA, 10 bp, Artificial Sequence
  Synthetic Sequence
tataaactga

SEQ ID NO: 6650 - DNA, 10 bp, Artificial Sequence
  Synthetic Sequence
agggcctcct

SEQ ID NO: 6651 - DNA, 10 bp, Artificial Sequence
  Synthetic Sequence
aaggacgaga

SEQ ID NO: 6652 - DNA, 10 bp, Artificial Sequence
  Synthetic Sequence
gctgctagga

SEQ ID NO: 6653 - DNA, 10 bp, Artificial Sequence
  Synthetic Sequence
tctttgtctt

SEQ ID NO: 6654 - DNA, 10 bp, Artificial Sequence
  Synthetic Sequence
gatcttgggc

SEQ ID NO: 6655 - DNA, 10 bp, Artificial Sequence
  Synthetic Sequence
acagtgtaca

SEQ ID NO: 6656 - DNA, 10 bp, Artificial Sequence
  Synthetic Sequence
tacgactacc

SEQ ID NO: 6657 - DNA, 10 bp, Artificial Sequence
  Synthetic Sequence
gactatcaat

SEQ ID NO: 6658 - DNA, 10 bp, Artificial Sequence
  Synthetic Sequence
ttcatcatcg

SEQ ID NO: 6659 - DNA, 10 bp, Artificial Sequence
  Synthetic Sequence
tatcatctgc

SEQ ID NO: 6660 - DNA, 10 bp, Artificial Sequence
  Synthetic Sequence
gcgctaatcg

SEQ ID NO: 6661 - DNA, 10 bp, Artificial Sequence
  Synthetic Sequence
gggtactccg

SEQ ID NO: 6662 - DNA, 10 bp, Artificial Sequence
  Synthetic Sequence
tgggataata

SEQ ID NO: 6663 - DNA, 10 bp, Artificial Sequence
  Synthetic Sequence
taggcaaacg

SEQ ID NO: 6664 - DNA, 10 bp, Artificial Sequence
  Synthetic Sequence
cgttcaggac

SEQ ID NO: 6665 - DNA, 10 bp, Artificial Sequence
  Synthetic Sequence
cacctataca

SEQ ID NO: 6666 - DNA, 10 bp, Artificial Sequence
  Synthetic Sequence
aacttcatca

SEQ ID NO: 6667 - DNA, 10 bp, Artificial Sequence
  Synthetic Sequence
cagtaccatc

SEQ ID NO: 6668 - DNA, 10 bp, Artificial Sequence
  Synthetic Sequence
tcatatcgaa

SEQ ID NO: 6669 - DNA, 10 bp, Artificial Sequence
  Synthetic Sequence
gtacaaattc

SEQ ID NO: 6670 - DNA, 10 bp, Artificial Sequence
  Synthetic Sequence
tttgaagaga

SEQ ID NO: 6671 - DNA, 10 bp, Artificial Sequence
  Synthetic Sequence
atcaggagag

SEQ ID NO: 6672 - DNA, 10 bp, Artificial Sequence
  Synthetic Sequence
gttacgcacc

SEQ ID NO: 6673 - DNA, 10 bp, Artificial Sequence
  Synthetic Sequence
agagtccgga

SEQ ID NO: 6674 - DNA, 10 bp, Artificial Sequence
  Synthetic Sequence
cggtggaagt

SEQ ID NO: 6675 - DNA, 10 bp, Artificial Sequence
  Synthetic Sequence
agagcctatc

SEQ ID NO: 6676 - DNA, 10 bp, Artificial Sequence
  Synthetic Sequence
gattgatcag

SEQ ID NO: 6677 - DNA, 10 bp, Artificial Sequence
  Synthetic Sequence
gcgcgagtat

SEQ ID NO: 6678 - DNA, 10 bp, Artificial Sequence
  Synthetic Sequence
tgccaggtcc

SEQ ID NO: 6679 - DNA, 10 bp, Artificial Sequence
  Synthetic Sequence
ctgggtgacg

SEQ ID NO: 6680 - DNA, 10 bp, Artificial Sequence
  Synthetic Sequence
aagcatagcc

SEQ ID NO: 6681 - DNA, 10 bp, Artificial Sequence
  Synthetic Sequence
caaacaggga

SEQ ID NO: 6682 - DNA, 10 bp, Artificial Sequence
  Synthetic Sequence
aaggcatata

SEQ ID NO: 6683 - DNA, 10 bp, Artificial Sequence
  Synthetic Sequence
tgtccaccgg

SEQ ID NO: 6684 - DNA, 10 bp, Artificial Sequence
  Synthetic Sequence
tagtcgaagt

SEQ ID NO: 6685 - DNA, 10 bp, Artificial Sequence
  Synthetic Sequence
ttcacgaatc

SEQ ID NO: 6686 - DNA, 10 bp, Artificial Sequence
  Synthetic Sequence
ggaaggaaat

SEQ ID NO: 6687 - DNA, 10 bp, Artificial Sequence
  Synthetic Sequence
cggtgtttgt

SEQ ID NO: 6688 - DNA, 10 bp, Artificial Sequence
  Synthetic Sequence
cactcccaca

SEQ ID NO: 6689 - DNA, 10 bp, Artificial Sequence
  Synthetic Sequence
ctgattgatt

SEQ ID NO: 6690 - DNA, 10 bp, Artificial Sequence
  Synthetic Sequence
agttcgtgcg

SEQ ID NO: 6691 - DNA, 10 bp, Artificial Sequence
  Synthetic Sequence
gtcctcaagc

SEQ ID NO: 6692 - DNA, 10 bp, Artificial Sequence
  Synthetic Sequence
ggccatgttc

SEQ ID NO: 6693 - DNA, 10 bp, Artificial Sequence
  Synthetic Sequence
cgcatggtgt

SEQ ID NO: 6694 - DNA, 10 bp, Artificial Sequence
  Synthetic Sequence
tcgactcgga

SEQ ID NO: 6695 - DNA, 10 bp, Artificial Sequence
  Synthetic Sequence
gacgggtgtc

SEQ ID NO: 6696 - DNA, 10 bp, Artificial Sequence
  Synthetic Sequence
gtatgcaggg

SEQ ID NO: 6697 - DNA, 10 bp, Artificial Sequence
  Synthetic Sequence
tgttagtcca

SEQ ID NO: 6698 - DNA, 10 bp, Artificial Sequence
  Synthetic Sequence
accctgagga

SEQ ID NO: 6699 - DNA, 10 bp, Artificial Sequence
  Synthetic Sequence
ctcgtagctg

SEQ ID NO: 6700 - DNA, 10 bp, Artificial Sequence
  Synthetic Sequence
aggtgaaatg

SEQ ID NO: 6701 - DNA, 10 bp, Artificial Sequence
  Synthetic Sequence
tacaacaaac

SEQ ID NO: 6702 - DNA, 10 bp, Artificial Sequence
  Synthetic Sequence
cattcttctc

SEQ ID NO: 6703 - DNA, 10 bp, Artificial Sequence
  Synthetic Sequence
acaccagcga

SEQ ID NO: 6704 - DNA, 10 bp, Artificial Sequence
  Synthetic Sequence
ggaaacccag

SEQ ID NO: 6705 - DNA, 10 bp, Artificial Sequence
  Synthetic Sequence
agtagagccg

SEQ ID NO: 6706 - DNA, 10 bp, Artificial Sequence
  Synthetic Sequence
ttcaagcaac

SEQ ID NO: 6707 - DNA, 10 bp, Artificial Sequence
  Synthetic Sequence
gatcaccata

SEQ ID NO: 6708 - DNA, 10 bp, Artificial Sequence
  Synthetic Sequence
atatactagt

SEQ ID NO: 6709 - DNA, 10 bp, Artificial Sequence
  Synthetic Sequence
cttaaatagg

SEQ ID NO: 6710 - DNA, 10 bp, Artificial Sequence
  Synthetic Sequence
gtctcagcaa

SEQ ID NO: 6711 - DNA, 10 bp, Artificial Sequence
  Synthetic Sequence
cacttatgta

SEQ ID NO: 6712 - DNA, 10 bp, Artificial Sequence
  Synthetic Sequence
tgccctcacg

SEQ ID NO: 6713 - DNA, 10 bp, Artificial Sequence
  Synthetic Sequence
tcctttacag

SEQ ID NO: 6714 - DNA, 10 bp, Artificial Sequence
  Synthetic Sequence
tcgctacgct

SEQ ID NO: 6715 - DNA, 10 bp, Artificial Sequence
  Synthetic Sequence
cacgaacttc

SEQ ID NO: 6716 - DNA, 10 bp, Artificial Sequence
  Synthetic Sequence
taagcacaca

SEQ ID NO: 6717 - DNA, 10 bp, Artificial Sequence
  Synthetic Sequence
gtgcccacca

SEQ ID NO: 6718 - DNA, 10 bp, Artificial Sequence
  Synthetic Sequence
tctcggaagc

SEQ ID NO: 6719 - DNA, 10 bp, Artificial Sequence
  Synthetic Sequence
ggtttctgtg

SEQ ID NO: 6720 - DNA, 10 bp, Artificial Sequence
  Synthetic Sequence
gagagtagat

SEQ ID NO: 6721 - DNA, 10 bp, Artificial Sequence
  Synthetic Sequence
ggccacttcg

SEQ ID NO: 6722 - DNA, 10 bp, Artificial Sequence
  Synthetic Sequence
catcctctag

SEQ ID NO: 6723 - DNA, 10 bp, Artificial Sequence
  Synthetic Sequence
tatccgcttg

SEQ ID NO: 6724 - DNA, 10 bp, Artificial Sequence
  Synthetic Sequence
agtgttgatt

SEQ ID NO: 6725 - DNA, 10 bp, Artificial Sequence
  Synthetic Sequence
ccgaattgac

SEQ ID NO: 6726 - DNA, 10 bp, Artificial Sequence
  Synthetic Sequence
gtagaacgtt

SEQ ID NO: 6727 - DNA, 10 bp, Artificial Sequence
  Synthetic Sequence
tcgtttcaac

SEQ ID NO: 6728 - DNA, 10 bp, Artificial Sequence
  Synthetic Sequence
tagctatgca

SEQ ID NO: 6729 - DNA, 10 bp, Artificial Sequence
  Synthetic Sequence
gtcccaaact

SEQ ID NO: 6730 - DNA, 10 bp, Artificial Sequence
  Synthetic Sequence
ctttgcagct

SEQ ID NO: 6731 - DNA, 10 bp, Artificial Sequence
  Synthetic Sequence
tggatttgac

SEQ ID NO: 6732 - DNA, 10 bp, Artificial Sequence
  Synthetic Sequence
ttaggtttgt

SEQ ID NO: 6733 - DNA, 10 bp, Artificial Sequence
  Synthetic Sequence
tccactatgg

SEQ ID NO: 6734 - DNA, 10 bp, Artificial Sequence
  Synthetic Sequence
aaggaagcgg

SEQ ID NO: 6735 - DNA, 10 bp, Artificial Sequence
  Synthetic Sequence
ccatgtccga

SEQ ID NO: 6736 - DNA, 10 bp, Artificial Sequence
  Synthetic Sequence
cgcgattagt

SEQ ID NO: 6737 - DNA, 10 bp, Artificial Sequence
  Synthetic Sequence
cctttcacaa

SEQ ID NO: 6738 - DNA, 10 bp, Artificial Sequence
  Synthetic Sequence
ctcctcagcc

SEQ ID NO: 6739 - DNA, 10 bp, Artificial Sequence
  Synthetic Sequence
gtggactgtt

SEQ ID NO: 6740 - DNA, 10 bp, Artificial Sequence
  Synthetic Sequence
gtggtcaaga

SEQ ID NO: 6741 - DNA, 10 bp, Artificial Sequence
  Synthetic Sequence
tgtcgtcgtg

SEQ ID NO: 6742 - DNA, 10 bp, Artificial Sequence
  Synthetic Sequence
catagcaaag

SEQ ID NO: 6743 - DNA, 10 bp, Artificial Sequence
  Synthetic Sequence
gtgtacgaca

SEQ ID NO: 6744 - DNA, 10 bp, Artificial Sequence
  Synthetic Sequence
tctgcggata

SEQ ID NO: 6745 - DNA, 10 bp, Artificial Sequence
  Synthetic Sequence
aaatatagaa

SEQ ID NO: 6746 - DNA, 10 bp, Artificial Sequence
  Synthetic Sequence
tggattaccc

SEQ ID NO: 6747 - DNA, 10 bp, Artificial Sequence
  Synthetic Sequence
atactaatgg

SEQ ID NO: 6748 - DNA, 10 bp, Artificial Sequence
  Synthetic Sequence
aaggagagtt

SEQ ID NO: 6749 - DNA, 10 bp, Artificial Sequence
  Synthetic Sequence
agctcgcgac

SEQ ID NO: 6750 - DNA, 10 bp, Artificial Sequence
  Synthetic Sequence
ctcataaaca

SEQ ID NO: 6751 - DNA, 10 bp, Artificial Sequence
  Synthetic Sequence
caccgaggtc

SEQ ID NO: 6752 - DNA, 10 bp, Artificial Sequence
  Synthetic Sequence
ctggtaacta

SEQ ID NO: 6753 - DNA, 10 bp, Artificial Sequence
  Synthetic Sequence
attccctgcc

SEQ ID NO: 6754 - DNA, 10 bp, Artificial Sequence
  Synthetic Sequence
tttgcctgca

SEQ ID NO: 6755 - DNA, 10 bp, Artificial Sequence
  Synthetic Sequence
ctctttctca

SEQ ID NO: 6756 - DNA, 10 bp, Artificial Sequence
  Synthetic Sequence
gggaatcggc

SEQ ID NO: 6757 - DNA, 10 bp, Artificial Sequence
  Synthetic Sequence
acttgactgg

SEQ ID NO: 6758 - DNA, 10 bp, Artificial Sequence
  Synthetic Sequence
ctttgttcgt

SEQ ID NO: 6759 - DNA, 10 bp, Artificial Sequence
  Synthetic Sequence
caatgccgta

SEQ ID NO: 6760 - DNA, 10 bp, Artificial Sequence
  Synthetic Sequence
atacagctga

SEQ ID NO: 6761 - DNA, 10 bp, Artificial Sequence
  Synthetic Sequence
acatcctgag

SEQ ID NO: 6762 - DNA, 10 bp, Artificial Sequence
  Synthetic Sequence
tgatcctgtc

SEQ ID NO: 6763 - DNA, 10 bp, Artificial Sequence
  Synthetic Sequence
atctcccggc

SEQ ID NO: 6764 - DNA, 10 bp, Artificial Sequence
  Synthetic Sequence
cagcactgaa

SEQ ID NO: 6765 - DNA, 10 bp, Artificial Sequence
  Synthetic Sequence
tattgctttc

SEQ ID NO: 6766 - DNA, 10 bp, Artificial Sequence
  Synthetic Sequence
cgacagcaga

SEQ ID NO: 6767 - DNA, 10 bp, Artificial Sequence
  Synthetic Sequence
cgacaagccc

SEQ ID NO: 6768 - DNA, 10 bp, Artificial Sequence
  Synthetic Sequence
caacatgcct

SEQ ID NO: 6769 - DNA, 10 bp, Artificial Sequence
  Synthetic Sequence
cccgaaacct

SEQ ID NO: 6770 - DNA, 10 bp, Artificial Sequence
  Synthetic Sequence
tcggcacctg

SEQ ID NO: 6771 - DNA, 10 bp, Artificial Sequence
  Synthetic Sequence
tgtggattgc

SEQ ID NO: 6772 - DNA, 10 bp, Artificial Sequence
  Synthetic Sequence
atccctgagg

SEQ ID NO: 6773 - DNA, 10 bp, Artificial Sequence
  Synthetic Sequence
gtacttattg

SEQ ID NO: 6774 - DNA, 10 bp, Artificial Sequence
  Synthetic Sequence
agcaatcgag

SEQ ID NO: 6775 - DNA, 10 bp, Artificial Sequence
  Synthetic Sequence
atgacagagg

SEQ ID NO: 6776 - DNA, 10 bp, Artificial Sequence
  Synthetic Sequence
cggatccgca

SEQ ID NO: 6777 - DNA, 10 bp, Artificial Sequence
  Synthetic Sequence
ttgaaacgct

SEQ ID NO: 6778 - DNA, 10 bp, Artificial Sequence
  Synthetic Sequence
gcccatatgg

SEQ ID NO: 6779 - DNA, 10 bp, Artificial Sequence
  Synthetic Sequence
gataggcaca

SEQ ID NO: 6780 - DNA, 10 bp, Artificial Sequence
  Synthetic Sequence
cgttgttgaa

SEQ ID NO: 6781 - DNA, 10 bp, Artificial Sequence
  Synthetic Sequence
taatcaattc

SEQ ID NO: 6782 - DNA, 10 bp, Artificial Sequence
  Synthetic Sequence
accgggaacg

SEQ ID NO: 6783 - DNA, 10 bp, Artificial Sequence
  Synthetic Sequence
tcctgacaat

SEQ ID NO: 6784 - DNA, 10 bp, Artificial Sequence
  Synthetic Sequence
ttacgtgcta

SEQ ID NO: 6785 - DNA, 10 bp, Artificial Sequence
  Synthetic Sequence
aaatagctct

SEQ ID NO: 6786 - DNA, 10 bp, Artificial Sequence
  Synthetic Sequence
cgtcatcgtt

SEQ ID NO: 6787 - DNA, 10 bp, Artificial Sequence
  Synthetic Sequence
gcaaagcact

SEQ ID NO: 6788 - DNA, 10 bp, Artificial Sequence
  Synthetic Sequence
tcgggtctca

SEQ ID NO: 6789 - DNA, 10 bp, Artificial Sequence
  Synthetic Sequence
aggttcaaag

SEQ ID NO: 6790 - DNA, 10 bp, Artificial Sequence
  Synthetic Sequence
agactctagg

SEQ ID NO: 6791 - DNA, 10 bp, Artificial Sequence
  Synthetic Sequence
ccgtttagcg

SEQ ID NO: 6792 - DNA, 10 bp, Artificial Sequence
  Synthetic Sequence
atactgctct

SEQ ID NO: 6793 - DNA, 10 bp, Artificial Sequence
  Synthetic Sequence
tgttaccgct

SEQ ID NO: 6794 - DNA, 10 bp, Artificial Sequence
  Synthetic Sequence
gcctacggtg

SEQ ID NO: 6795 - DNA, 10 bp, Artificial Sequence
  Synthetic Sequence
tgagaggctc

SEQ ID NO: 6796 - DNA, 10 bp, Artificial Sequence
  Synthetic Sequence
aatccctaca

SEQ ID NO: 6797 - DNA, 10 bp, Artificial Sequence
  Synthetic Sequence
tggcagtgtt

SEQ ID NO: 6798 - DNA, 10 bp, Artificial Sequence
  Synthetic Sequence
acttgcattg

SEQ ID NO: 6799 - DNA, 10 bp, Artificial Sequence
  Synthetic Sequence
tgggcaagag

SEQ ID NO: 6800 - DNA, 10 bp, Artificial Sequence
  Synthetic Sequence
cgttactagt

SEQ ID NO: 6801 - DNA, 10 bp, Artificial Sequence
  Synthetic Sequence
tctccgtacc

SEQ ID NO: 6802 - DNA, 10 bp, Artificial Sequence
  Synthetic Sequence
cctaccttta

SEQ ID NO: 6803 - DNA, 10 bp, Artificial Sequence
  Synthetic Sequence
aagggagtgc

SEQ ID NO: 6804 - DNA, 10 bp, Artificial Sequence
  Synthetic Sequence
aaagcggagt

SEQ ID NO: 6805 - DNA, 10 bp, Artificial Sequence
  Synthetic Sequence
cctacgacct

SEQ ID NO: 6806 - DNA, 10 bp, Artificial Sequence
  Synthetic Sequence
tcaggtaggc

SEQ ID NO: 6807 - DNA, 10 bp, Artificial Sequence
  Synthetic Sequence
cctaagagcg

SEQ ID NO: 6808 - DNA, 10 bp, Artificial Sequence
  Synthetic Sequence
tacatctggg

SEQ ID NO: 6809 - DNA, 10 bp, Artificial Sequence
  Synthetic Sequence
atataatccc

SEQ ID NO: 6810 - DNA, 10 bp, Artificial Sequence
  Synthetic Sequence
tccttacgtt

SEQ ID NO: 6811 - DNA, 10 bp, Artificial Sequence
  Synthetic Sequence
ttgttcatca

SEQ ID NO: 6812 - DNA, 10 bp, Artificial Sequence
  Synthetic Sequence
ccgtcagtac

SEQ ID NO: 6813 - DNA, 10 bp, Artificial Sequence
  Synthetic Sequence
ttgccatctg

SEQ ID NO: 6814 - DNA, 10 bp, Artificial Sequence
  Synthetic Sequence
ggagtcagtg

SEQ ID NO: 6815 - DNA, 10 bp, Artificial Sequence
  Synthetic Sequence
atcacacgag

SEQ ID NO: 6816 - DNA, 10 bp, Artificial Sequence
  Synthetic Sequence
ttgggttagc

SEQ ID NO: 6817 - DNA, 10 bp, Artificial Sequence
  Synthetic Sequence
ctcattaccc

SEQ ID NO: 6818 - DNA, 10 bp, Artificial Sequence
  Synthetic Sequence
atgagagtaa

SEQ ID NO: 6819 - DNA, 10 bp, Artificial Sequence
  Synthetic Sequence
cgatgtattg

SEQ ID NO: 6820 - DNA, 10 bp, Artificial Sequence
  Synthetic Sequence
tagatcaaat

SEQ ID NO: 6821 - DNA, 10 bp, Artificial Sequence
  Synthetic Sequence
accagataac

SEQ ID NO: 6822 - DNA, 10 bp, Artificial Sequence
  Synthetic Sequence
taaacgctgc

SEQ ID NO: 6823 - DNA, 10 bp, Artificial Sequence
  Synthetic Sequence
cacatttgca

SEQ ID NO: 6824 - DNA, 10 bp, Artificial Sequence
  Synthetic Sequence
gagaagaggt

SEQ ID NO: 6825 - DNA, 10 bp, Artificial Sequence
  Synthetic Sequence
tcgagctgtt

SEQ ID NO: 6826 - DNA, 10 bp, Artificial Sequence
  Synthetic Sequence
cgagagcaat

SEQ ID NO: 6827 - DNA, 10 bp, Artificial Sequence
  Synthetic Sequence
aacgtccgcc

SEQ ID NO: 6828 - DNA, 10 bp, Artificial Sequence
  Synthetic Sequence
cgcgtgtgtc

SEQ ID NO: 6829 - DNA, 10 bp, Artificial Sequence
  Synthetic Sequence
tggtttgaga

SEQ ID NO: 6830 - DNA, 10 bp, Artificial Sequence
  Synthetic Sequence
catatggtga

SEQ ID NO: 6831 - DNA, 10 bp, Artificial Sequence
  Synthetic Sequence
catagggctc

SEQ ID NO: 6832 - DNA, 10 bp, Artificial Sequence
  Synthetic Sequence
gattcgaccg

SEQ ID NO: 6833 - DNA, 10 bp, Artificial Sequence
  Synthetic Sequence
tagtggttat

SEQ ID NO: 6834 - DNA, 10 bp, Artificial Sequence
  Synthetic Sequence
tgggtatgga

SEQ ID NO: 6835 - DNA, 10 bp, Artificial Sequence
  Synthetic Sequence
caggacgcct

SEQ ID NO: 6836 - DNA, 10 bp, Artificial Sequence
  Synthetic Sequence
cgctaggcga

SEQ ID NO: 6837 - DNA, 10 bp, Artificial Sequence
  Synthetic Sequence
gtaatggtgc

SEQ ID NO: 6838 - DNA, 10 bp, Artificial Sequence
  Synthetic Sequence
gtgatctgtg

SEQ ID NO: 6839 - DNA, 10 bp, Artificial Sequence
  Synthetic Sequence
tcacctcacc

SEQ ID NO: 6840 - DNA, 10 bp, Artificial Sequence
  Synthetic Sequence
taagttcaac

SEQ ID NO: 6841 - DNA, 10 bp, Artificial Sequence
  Synthetic Sequence
tttcttaagg

SEQ ID NO: 6842 - DNA, 10 bp, Artificial Sequence
  Synthetic Sequence
tcacgttcgc

SEQ ID NO: 6843 - DNA, 10 bp, Artificial Sequence
  Synthetic Sequence
cctgggagct

SEQ ID NO: 6844 - DNA, 10 bp, Artificial Sequence
  Synthetic Sequence
gagagtgttt

SEQ ID NO: 6845 - DNA, 10 bp, Artificial Sequence
  Synthetic Sequence
gtaggcggct

SEQ ID NO: 6846 - DNA, 10 bp, Artificial Sequence
  Synthetic Sequence
tacgaattgt

SEQ ID NO: 6847 - DNA, 10 bp, Artificial Sequence
  Synthetic Sequence
tagcgccctc

SEQ ID NO: 6848 - DNA, 10 bp, Artificial Sequence
  Synthetic Sequence
cagcccatta

SEQ ID NO: 6849 - DNA, 10 bp, Artificial Sequence
  Synthetic Sequence
cataacaagt

SEQ ID NO: 6850 - DNA, 10 bp, Artificial Sequence
  Synthetic Sequence
ccgtcgtagg

SEQ ID NO: 6851 - DNA, 10 bp, Artificial Sequence
  Synthetic Sequence
aaatgatcga

SEQ ID NO: 6852 - DNA, 10 bp, Artificial Sequence
  Synthetic Sequence
gcggatatgc

SEQ ID NO: 6853 - DNA, 10 bp, Artificial Sequence
  Synthetic Sequence
actacgtgcc

SEQ ID NO: 6854 - DNA, 10 bp, Artificial Sequence
  Synthetic Sequence
attaacgctg

SEQ ID NO: 6855 - DNA, 10 bp, Artificial Sequence
  Synthetic Sequence
accaataaat

SEQ ID NO: 6856 - DNA, 10 bp, Artificial Sequence
  Synthetic Sequence
gtcgcacaag

SEQ ID NO: 6857 - DNA, 10 bp, Artificial Sequence
  Synthetic Sequence
ttgtcggcaa

SEQ ID NO: 6858 - DNA, 10 bp, Artificial Sequence
  Synthetic Sequence
acttggatat

SEQ ID NO: 6859 - DNA, 10 bp, Artificial Sequence
  Synthetic Sequence
acactactgt

SEQ ID NO: 6860 - DNA, 10 bp, Artificial Sequence
  Synthetic Sequence
tccaaggtgc

SEQ ID NO: 6861 - DNA, 10 bp, Artificial Sequence
  Synthetic Sequence
ggcaagcctg

SEQ ID NO: 6862 - DNA, 10 bp, Artificial Sequence
  Synthetic Sequence
atgtttctga

SEQ ID NO: 6863 - DNA, 10 bp, Artificial Sequence
  Synthetic Sequence
cacgatggtg

SEQ ID NO: 6864 - DNA, 10 bp, Artificial Sequence
  Synthetic Sequence
caggattagg

SEQ ID NO: 6865 - DNA, 10 bp, Artificial Sequence
  Synthetic Sequence
ccctaacgcg

SEQ ID NO: 6866 - DNA, 10 bp, Artificial Sequence
  Synthetic Sequence
gaaatgggtg

SEQ ID NO: 6867 - DNA, 10 bp, Artificial Sequence
  Synthetic Sequence
atgtgtgaca

SEQ ID NO: 6868 - DNA, 10 bp, Artificial Sequence
  Synthetic Sequence
gccgctaaac

SEQ ID NO: 6869 - DNA, 10 bp, Artificial Sequence
  Synthetic Sequence
gtgtcaactc

SEQ ID NO: 6870 - DNA, 10 bp, Artificial Sequence
  Synthetic Sequence
ccctggatcc

SEQ ID NO: 6871 - DNA, 10 bp, Artificial Sequence
  Synthetic Sequence
tataaccagg

SEQ ID NO: 6872 - DNA, 10 bp, Artificial Sequence
  Synthetic Sequence
tgcttgtgtt

SEQ ID NO: 6873 - DNA, 10 bp, Artificial Sequence
  Synthetic Sequence
cgatttgata

SEQ ID NO: 6874 - DNA, 10 bp, Artificial Sequence
  Synthetic Sequence
gcttgtgccc

SEQ ID NO: 6875 - DNA, 10 bp, Artificial Sequence
  Synthetic Sequence
cgtgaagact

SEQ ID NO: 6876 - DNA, 10 bp, Artificial Sequence
  Synthetic Sequence
gcttcaacgg

SEQ ID NO: 6877 - DNA, 10 bp, Artificial Sequence
  Synthetic Sequence
accgacgtat

SEQ ID NO: 6878 - DNA, 10 bp, Artificial Sequence
  Synthetic Sequence
ctacttctta

SEQ ID NO: 6879 - DNA, 10 bp, Artificial Sequence
  Synthetic Sequence
ccaggaatcc

SEQ ID NO: 6880 - DNA, 10 bp, Artificial Sequence
  Synthetic Sequence
tcgaggtacc

SEQ ID NO: 6881 - DNA, 10 bp, Artificial Sequence
  Synthetic Sequence
gttatatatt

SEQ ID NO: 6882 - DNA, 10 bp, Artificial Sequence
  Synthetic Sequence
gaatcacgct

SEQ ID NO: 6883 - DNA, 10 bp, Artificial Sequence
  Synthetic Sequence
aggatcgtct

SEQ ID NO: 6884 - DNA, 10 bp, Artificial Sequence
  Synthetic Sequence
ggtttgtgac

SEQ ID NO: 6885 - DNA, 10 bp, Artificial Sequence
  Synthetic Sequence
aaatagtagg

SEQ ID NO: 6886 - DNA, 10 bp, Artificial Sequence
  Synthetic Sequence
tgcacgaccc

SEQ ID NO: 6887 - DNA, 10 bp, Artificial Sequence
  Synthetic Sequence
gctcgatgtg

SEQ ID NO: 6888 - DNA, 10 bp, Artificial Sequence
  Synthetic Sequence
ttcagctacg

SEQ ID NO: 6889 - DNA, 10 bp, Artificial Sequence
  Synthetic Sequence
tgttataaat

SEQ ID NO: 6890 - DNA, 10 bp, Artificial Sequence
  Synthetic Sequence
aatccggcgg

SEQ ID NO: 6891 - DNA, 10 bp, Artificial Sequence
  Synthetic Sequence
attggctcat

SEQ ID NO: 6892 - DNA, 10 bp, Artificial Sequence
  Synthetic Sequence
tccgagtagc

SEQ ID NO: 6893 - DNA, 10 bp, Artificial Sequence
  Synthetic Sequence
ctaaatgctg

SEQ ID NO: 6894 - DNA, 10 bp, Artificial Sequence
  Synthetic Sequence
cctacgtaca

SEQ ID NO: 6895 - DNA, 10 bp, Artificial Sequence
  Synthetic Sequence
ataagaccga

SEQ ID NO: 6896 - DNA, 10 bp, Artificial Sequence
  Synthetic Sequence
tcacgcggat

SEQ ID NO: 6897 - DNA, 10 bp, Artificial Sequence
  Synthetic Sequence
gtcgatcacg

SEQ ID NO: 6898 - DNA, 10 bp, Artificial Sequence
  Synthetic Sequence
gtgatggtat

SEQ ID NO: 6899 - DNA, 10 bp, Artificial Sequence
  Synthetic Sequence
ataagtatta

SEQ ID NO: 6900 - DNA, 10 bp, Artificial Sequence
  Synthetic Sequence
taaacagcaa

SEQ ID NO: 6901 - DNA, 10 bp, Artificial Sequence
  Synthetic Sequence
accataacgc

SEQ ID NO: 6902 - DNA, 10 bp, Artificial Sequence
  Synthetic Sequence
agtctgtgag

SEQ ID NO: 6903 - DNA, 10 bp, Artificial Sequence
  Synthetic Sequence
atccaacttt

SEQ ID NO: 6904 - DNA, 10 bp, Artificial Sequence
  Synthetic Sequence
gagtccggaa

SEQ ID NO: 6905 - DNA, 10 bp, Artificial Sequence
  Synthetic Sequence
agccagtatt

SEQ ID NO: 6906 - DNA, 10 bp, Artificial Sequence
  Synthetic Sequence
acgcccgcta

SEQ ID NO: 6907 - DNA, 10 bp, Artificial Sequence
  Synthetic Sequence
tgctacgcaa

SEQ ID NO: 6908 - DNA, 10 bp, Artificial Sequence
  Synthetic Sequence
gcaaacaata

SEQ ID NO: 6909 - DNA, 10 bp, Artificial Sequence
  Synthetic Sequence
tctcttcacg

SEQ ID NO: 6910 - DNA, 10 bp, Artificial Sequence
  Synthetic Sequence
ccatttacgg

SEQ ID NO: 6911 - DNA, 10 bp, Artificial Sequence
  Synthetic Sequence
tacattggtc

SEQ ID NO: 6912 - DNA, 10 bp, Artificial Sequence
  Synthetic Sequence
atcaatgata

SEQ ID NO: 6913 - DNA, 10 bp, Artificial Sequence
  Synthetic Sequence
agtctagaac

SEQ ID NO: 6914 - DNA, 10 bp, Artificial Sequence
  Synthetic Sequence
cgtcatagac

SEQ ID NO: 6915 - DNA, 10 bp, Artificial Sequence
  Synthetic Sequence
aaggttattt

SEQ ID NO: 6916 - DNA, 10 bp, Artificial Sequence
  Synthetic Sequence
agtacagtaa

SEQ ID NO: 6917 - DNA, 10 bp, Artificial Sequence
  Synthetic Sequence
ctggcaaagt

SEQ ID NO: 6918 - DNA, 10 bp, Artificial Sequence
  Synthetic Sequence
gggtgcccta

SEQ ID NO: 6919 - DNA, 10 bp, Artificial Sequence
  Synthetic Sequence
tggcatagat

SEQ ID NO: 6920 - DNA, 10 bp, Artificial Sequence
  Synthetic Sequence
gtttggcgtg

SEQ ID NO: 6921 - DNA, 10 bp, Artificial Sequence
  Synthetic Sequence
aataccgtct

SEQ ID NO: 6922 - DNA, 10 bp, Artificial Sequence
  Synthetic Sequence
gagcgtaaag

SEQ ID NO: 6923 - DNA, 10 bp, Artificial Sequence
  Synthetic Sequence
cccatgttca

SEQ ID NO: 6924 - DNA, 10 bp, Artificial Sequence
  Synthetic Sequence
acgaccatat

SEQ ID NO: 6925 - DNA, 10 bp, Artificial Sequence
  Synthetic Sequence
aaatccataa

SEQ ID NO: 6926 - DNA, 10 bp, Artificial Sequence
  Synthetic Sequence
gcctagggaa

SEQ ID NO: 6927 - DNA, 10 bp, Artificial Sequence
  Synthetic Sequence
cccaatacca

SEQ ID NO: 6928 - DNA, 10 bp, Artificial Sequence
  Synthetic Sequence
gacaagggat

SEQ ID NO: 6929 - DNA, 10 bp, Artificial Sequence
  Synthetic Sequence
ctgtggccta

SEQ ID NO: 6930 - DNA, 10 bp, Artificial Sequence
  Synthetic Sequence
gggatactat

SEQ ID NO: 6931 - DNA, 10 bp, Artificial Sequence
  Synthetic Sequence
ttgcctctac

SEQ ID NO: 6932 - DNA, 10 bp, Artificial Sequence
  Synthetic Sequence
cccaaattcc

SEQ ID NO: 6933 - DNA, 10 bp, Artificial Sequence
  Synthetic Sequence
tcggaccgca

SEQ ID NO: 6934 - DNA, 10 bp, Artificial Sequence
  Synthetic Sequence
tatgcccgaa

SEQ ID NO: 6935 - DNA, 10 bp, Artificial Sequence
  Synthetic Sequence
gtcgtggcct

SEQ ID NO: 6936 - DNA, 10 bp, Artificial Sequence
  Synthetic Sequence
ctccgcatgt

SEQ ID NO: 6937 - DNA, 10 bp, Artificial Sequence
  Synthetic Sequence
acgtggcatg

SEQ ID NO: 6938 - DNA, 10 bp, Artificial Sequence
  Synthetic Sequence
atctctatgt

SEQ ID NO: 6939 - DNA, 10 bp, Artificial Sequence
  Synthetic Sequence
aagcgcgctg

SEQ ID NO: 6940 - DNA, 10 bp, Artificial Sequence
  Synthetic Sequence
ttgtggaagc

SEQ ID NO: 6941 - DNA, 10 bp, Artificial Sequence
  Synthetic Sequence
acgataacct

SEQ ID NO: 6942 - DNA, 10 bp, Artificial Sequence
  Synthetic Sequence
ggcatatgcc

SEQ ID NO: 6943 - DNA, 10 bp, Artificial Sequence
  Synthetic Sequence
agcacaagca

SEQ ID NO: 6944 - DNA, 10 bp, Artificial Sequence
  Synthetic Sequence
gcctaacgtc

SEQ ID NO: 6945 - DNA, 10 bp, Artificial Sequence
  Synthetic Sequence
ccgcgtgaag

SEQ ID NO: 6946 - DNA, 10 bp, Artificial Sequence
  Synthetic Sequence
gtttggagca

SEQ ID NO: 6947 - DNA, 10 bp, Artificial Sequence
  Synthetic Sequence
acatgcccgg

SEQ ID NO: 6948 - DNA, 10 bp, Artificial Sequence
  Synthetic Sequence
tcgaattaaa

SEQ ID NO: 6949 - DNA, 10 bp, Artificial Sequence
  Synthetic Sequence
taacatgtga

SEQ ID NO: 6950 - DNA, 10 bp, Artificial Sequence
  Synthetic Sequence
cgagaaactt

SEQ ID NO: 6951 - DNA, 10 bp, Artificial Sequence
  Synthetic Sequence
accgcgagtg

SEQ ID NO: 6952 - DNA, 10 bp, Artificial Sequence
  Synthetic Sequence
tgtgagtttc

SEQ ID NO: 6953 - DNA, 10 bp, Artificial Sequence
  Synthetic Sequence
gcatgagctt

SEQ ID NO: 6954 - DNA, 10 bp, Artificial Sequence
  Synthetic Sequence
gaattaatca

SEQ ID NO: 6955 - DNA, 10 bp, Artificial Sequence
  Synthetic Sequence
attaaagaca

SEQ ID NO: 6956 - DNA, 10 bp, Artificial Sequence
  Synthetic Sequence
ggacgcttct

SEQ ID NO: 6957 - DNA, 10 bp, Artificial Sequence
  Synthetic Sequence
gactattacg

SEQ ID NO: 6958 - DNA, 10 bp, Artificial Sequence
  Synthetic Sequence
cgctttcttg

SEQ ID NO: 6959 - DNA, 10 bp, Artificial Sequence
  Synthetic Sequence
agagggatca

SEQ ID NO: 6960 - DNA, 10 bp, Artificial Sequence
  Synthetic Sequence
ggtgcccaga

SEQ ID NO: 6961 - DNA, 10 bp, Artificial Sequence
  Synthetic Sequence
tcagtgatgt

SEQ ID NO: 6962 - DNA, 10 bp, Artificial Sequence
  Synthetic Sequence
cctgaaggag

SEQ ID NO: 6963 - DNA, 10 bp, Artificial Sequence
  Synthetic Sequence
tacattgcag

SEQ ID NO: 6964 - DNA, 10 bp, Artificial Sequence
  Synthetic Sequence
aaatgagaaa

SEQ ID NO: 6965 - DNA, 10 bp, Artificial Sequence
  Synthetic Sequence
cactaacata

SEQ ID NO: 6966 - DNA, 10 bp, Artificial Sequence
  Synthetic Sequence
tttagggtcg

SEQ ID NO: 6967 - DNA, 10 bp, Artificial Sequence
  Synthetic Sequence
ccggtactta

SEQ ID NO: 6968 - DNA, 10 bp, Artificial Sequence
  Synthetic Sequence
aatacctcat

SEQ ID NO: 6969 - DNA, 10 bp, Artificial Sequence
  Synthetic Sequence
tctttagtat

SEQ ID NO: 6970 - DNA, 10 bp, Artificial Sequence
  Synthetic Sequence
attattgggt

SEQ ID NO: 6971 - DNA, 10 bp, Artificial Sequence
  Synthetic Sequence
actttctatc

SEQ ID NO: 6972 - DNA, 10 bp, Artificial Sequence
  Synthetic Sequence
tgtgtaaaga

SEQ ID NO: 6973 - DNA, 10 bp, Artificial Sequence
  Synthetic Sequence
tctgttcagt

SEQ ID NO: 6974 - DNA, 10 bp, Artificial Sequence
  Synthetic Sequence
gtcctcgaca

SEQ ID NO: 6975 - DNA, 10 bp, Artificial Sequence
  Synthetic Sequence
ccataaactc

SEQ ID NO: 6976 - DNA, 10 bp, Artificial Sequence
  Synthetic Sequence
aaacacctgt

SEQ ID NO: 6977 - DNA, 10 bp, Artificial Sequence
  Synthetic Sequence
ttgtgactcc

SEQ ID NO: 6978 - DNA, 10 bp, Artificial Sequence
  Synthetic Sequence
acttcccatg

SEQ ID NO: 6979 - DNA, 10 bp, Artificial Sequence
  Synthetic Sequence
tgctgctccg

SEQ ID NO: 6980 - DNA, 10 bp, Artificial Sequence
  Synthetic Sequence
taattggtgc

SEQ ID NO: 6981 - DNA, 10 bp, Artificial Sequence
  Synthetic Sequence
gtggaagcaa

SEQ ID NO: 6982 - DNA, 10 bp, Artificial Sequence
  Synthetic Sequence
ttcatcgagt

SEQ ID NO: 6983 - DNA, 10 bp, Artificial Sequence
  Synthetic Sequence
cgcccataat

SEQ ID NO: 6984 - DNA, 10 bp, Artificial Sequence
  Synthetic Sequence
aattctgtgt

SEQ ID NO: 6985 - DNA, 10 bp, Artificial Sequence
  Synthetic Sequence
tctgttcctc

SEQ ID NO: 6986 - DNA, 10 bp, Artificial Sequence
  Synthetic Sequence
tgattctgaa

SEQ ID NO: 6987 - DNA, 10 bp, Artificial Sequence
  Synthetic Sequence
ggcaaggagc

SEQ ID NO: 6988 - DNA, 10 bp, Artificial Sequence
  Synthetic Sequence
tgtgcttgtc

SEQ ID NO: 6989 - DNA, 10 bp, Artificial Sequence
  Synthetic Sequence
gactcgcaaa

SEQ ID NO: 6990 - DNA, 10 bp, Artificial Sequence
  Synthetic Sequence
ctcaaccaca

SEQ ID NO: 6991 - DNA, 10 bp, Artificial Sequence
  Synthetic Sequence
attaatgtcg

SEQ ID NO: 6992 - DNA, 10 bp, Artificial Sequence
  Synthetic Sequence
attcgtacac

SEQ ID NO: 6993 - DNA, 10 bp, Artificial Sequence
  Synthetic Sequence
tagcgtacgt

SEQ ID NO: 6994 - DNA, 10 bp, Artificial Sequence
  Synthetic Sequence
acgttccgca

SEQ ID NO: 6995 - DNA, 10 bp, Artificial Sequence
  Synthetic Sequence
caaactccag

SEQ ID NO: 6996 - DNA, 10 bp, Artificial Sequence
  Synthetic Sequence
cgtccgacag

SEQ ID NO: 6997 - DNA, 10 bp, Artificial Sequence
  Synthetic Sequence
agcccagcta

SEQ ID NO: 6998 - DNA, 10 bp, Artificial Sequence
  Synthetic Sequence
gactaggaag

SEQ ID NO: 6999 - DNA, 10 bp, Artificial Sequence
  Synthetic Sequence
cgacactttg

SEQ ID NO: 7000 - DNA, 10 bp, Artificial Sequence
  Synthetic Sequence
ataagcacca

SEQ ID NO: 7001 - DNA, 10 bp, Artificial Sequence
  Synthetic Sequence
gcaacatgcc

SEQ ID NO: 7002 - DNA, 10 bp, Artificial Sequence
  Synthetic Sequence
gctggcgact

SEQ ID NO: 7003 - DNA, 10 bp, Artificial Sequence
  Synthetic Sequence
gtggagcaac

SEQ ID NO: 7004 - DNA, 10 bp, Artificial Sequence
  Synthetic Sequence
aagacctcgc

SEQ ID NO: 7005 - DNA, 10 bp, Artificial Sequence
  Synthetic Sequence
cccaccgata

SEQ ID NO: 7006 - DNA, 10 bp, Artificial Sequence
  Synthetic Sequence
gtgatttgat

SEQ ID NO: 7007 - DNA, 10 bp, Artificial Sequence
  Synthetic Sequence
tcccgtgcat

SEQ ID NO: 7008 - DNA, 10 bp, Artificial Sequence
  Synthetic Sequence
tctgggattg

SEQ ID NO: 7009 - DNA, 10 bp, Artificial Sequence
  Synthetic Sequence
tcatgaggcg

SEQ ID NO: 7010 - DNA, 10 bp, Artificial Sequence
  Synthetic Sequence
aggtatcaca

SEQ ID NO: 7011 - DNA, 10 bp, Artificial Sequence
  Synthetic Sequence
cgcgcagttc

SEQ ID NO: 7012 - DNA, 10 bp, Artificial Sequence
  Synthetic Sequence
cccttataat

SEQ ID NO: 7013 - DNA, 10 bp, Artificial Sequence
  Synthetic Sequence
tttgtcgcag

SEQ ID NO: 7014 - DNA, 10 bp, Artificial Sequence
  Synthetic Sequence
acggccacga

SEQ ID NO: 7015 - DNA, 10 bp, Artificial Sequence
  Synthetic Sequence
tgggtgctct

SEQ ID NO: 7016 - DNA, 10 bp, Artificial Sequence
  Synthetic Sequence
tcctctagct

SEQ ID NO: 7017 - DNA, 10 bp, Artificial Sequence
  Synthetic Sequence
gaatcggtcg

SEQ ID NO: 7018 - DNA, 10 bp, Artificial Sequence
  Synthetic Sequence
gtcaatccgc

SEQ ID NO: 7019 - DNA, 10 bp, Artificial Sequence
  Synthetic Sequence
tgcgtgagac

SEQ ID NO: 7020 - DNA, 10 bp, Artificial Sequence
  Synthetic Sequence
agttaaccta

SEQ ID NO: 7021 - DNA, 10 bp, Artificial Sequence
  Synthetic Sequence
agagttggcc

SEQ ID NO: 7022 - DNA, 10 bp, Artificial Sequence
  Synthetic Sequence
tcaatgaatc

SEQ ID NO: 7023 - DNA, 10 bp, Artificial Sequence
  Synthetic Sequence
acagctaaag

SEQ ID NO: 7024 - DNA, 10 bp, Artificial Sequence
  Synthetic Sequence
cgtgtagaag

SEQ ID NO: 7025 - DNA, 10 bp, Artificial Sequence
  Synthetic Sequence
gatgtaacga

SEQ ID NO: 7026 - DNA, 10 bp, Artificial Sequence
  Synthetic Sequence
ggccctaatc

SEQ ID NO: 7027 - DNA, 10 bp, Artificial Sequence
  Synthetic Sequence
acgtttgatt

SEQ ID NO: 7028 - DNA, 10 bp, Artificial Sequence
  Synthetic Sequence
cgttgtggcc

SEQ ID NO: 7029 - DNA, 10 bp, Artificial Sequence
  Synthetic Sequence
tacgccaata

SEQ ID NO: 7030 - DNA, 10 bp, Artificial Sequence
  Synthetic Sequence
gaagaaaggt

SEQ ID NO: 7031 - DNA, 10 bp, Artificial Sequence
  Synthetic Sequence
ccatcttcct

SEQ ID NO: 7032 - DNA, 10 bp, Artificial Sequence
  Synthetic Sequence
caagggtcag

SEQ ID NO: 7033 - DNA, 10 bp, Artificial Sequence
  Synthetic Sequence
ttagtcatag

SEQ ID NO: 7034 - DNA, 10 bp, Artificial Sequence
  Synthetic Sequence
agtctgaagg

SEQ ID NO: 7035 - DNA, 10 bp, Artificial Sequence
  Synthetic Sequence
cgcggagaca

SEQ ID NO: 7036 - DNA, 10 bp, Artificial Sequence
  Synthetic Sequence
tggcggactc

SEQ ID NO: 7037 - DNA, 10 bp, Artificial Sequence
  Synthetic Sequence
actgccctga

SEQ ID NO: 7038 - DNA, 10 bp, Artificial Sequence
  Synthetic Sequence
ccgccgaaga

SEQ ID NO: 7039 - DNA, 10 bp, Artificial Sequence
  Synthetic Sequence
ttaataccgc

SEQ ID NO: 7040 - DNA, 10 bp, Artificial Sequence
  Synthetic Sequence
cggcattgtc

SEQ ID NO: 7041 - DNA, 10 bp, Artificial Sequence
  Synthetic Sequence
aggatgcgta

SEQ ID NO: 7042 - DNA, 10 bp, Artificial Sequence
  Synthetic Sequence
gtacagcaaa

SEQ ID NO: 7043 - DNA, 10 bp, Artificial Sequence
  Synthetic Sequence
atatcgccct

SEQ ID NO: 7044 - DNA, 10 bp, Artificial Sequence
  Synthetic Sequence
tgcaccgtta

SEQ ID NO: 7045 - DNA, 10 bp, Artificial Sequence
  Synthetic Sequence
cgtccatagc

SEQ ID NO: 7046 - DNA, 10 bp, Artificial Sequence
  Synthetic Sequence
gcgcgtcagt

SEQ ID NO: 7047 - DNA, 10 bp, Artificial Sequence
  Synthetic Sequence
tcggaataca

SEQ ID NO: 7048 - DNA, 10 bp, Artificial Sequence
  Synthetic Sequence
cgttgtaaca

SEQ ID NO: 7049 - DNA, 10 bp, Artificial Sequence
  Synthetic Sequence
atcttgggag

SEQ ID NO: 7050 - DNA, 10 bp, Artificial Sequence
  Synthetic Sequence
tccttgcgaa

SEQ ID NO: 7051 - DNA, 10 bp, Artificial Sequence
  Synthetic Sequence
gtaaggctga

SEQ ID NO: 7052 - DNA, 10 bp, Artificial Sequence
  Synthetic Sequence
cccgttctaa

SEQ ID NO: 7053 - DNA, 10 bp, Artificial Sequence
  Synthetic Sequence
tgcccgaatg

SEQ ID NO: 7054 - DNA, 10 bp, Artificial Sequence
  Synthetic Sequence
tgtccttcat

SEQ ID NO: 7055 - DNA, 10 bp, Artificial Sequence
  Synthetic Sequence
gatcagtaca

SEQ ID NO: 7056 - DNA, 10 bp, Artificial Sequence
  Synthetic Sequence
tatttagatc

SEQ ID NO: 7057 - DNA, 10 bp, Artificial Sequence
  Synthetic Sequence
tggtcacagc

SEQ ID NO: 7058 - DNA, 10 bp, Artificial Sequence
  Synthetic Sequence
gcatccgaaa

SEQ ID NO: 7059 - DNA, 10 bp, Artificial Sequence
  Synthetic Sequence
gcggtggtgt

SEQ ID NO: 7060 - DNA, 10 bp, Artificial Sequence
  Synthetic Sequence
ctagtgagcc

SEQ ID NO: 7061 - DNA, 10 bp, Artificial Sequence
  Synthetic Sequence
atctatattc

SEQ ID NO: 7062 - DNA, 10 bp, Artificial Sequence
  Synthetic Sequence
cttgtccgtc

SEQ ID NO: 7063 - DNA, 10 bp, Artificial Sequence
  Synthetic Sequence
agtcaaattg

SEQ ID NO: 7064 - DNA, 10 bp, Artificial Sequence
  Synthetic Sequence
gaggtcttaa

SEQ ID NO: 7065 - DNA, 10 bp, Artificial Sequence
  Synthetic Sequence
tagcgtagca

SEQ ID NO: 7066 - DNA, 10 bp, Artificial Sequence
  Synthetic Sequence
ctacctgggt

SEQ ID NO: 7067 - DNA, 10 bp, Artificial Sequence
  Synthetic Sequence
acgagccgga

SEQ ID NO: 7068 - DNA, 10 bp, Artificial Sequence
  Synthetic Sequence
gccgtatctt

SEQ ID NO: 7069 - DNA, 10 bp, Artificial Sequence
  Synthetic Sequence
gtctagacca

SEQ ID NO: 7070 - DNA, 10 bp, Artificial Sequence
  Synthetic Sequence
agctgcttag

SEQ ID NO: 7071 - DNA, 10 bp, Artificial Sequence
  Synthetic Sequence
gagccgcaac

SEQ ID NO: 7072 - DNA, 10 bp, Artificial Sequence
  Synthetic Sequence
tcggtttatc

SEQ ID NO: 7073 - DNA, 10 bp, Artificial Sequence
  Synthetic Sequence
ctttagattg

SEQ ID NO: 7074 - DNA, 10 bp, Artificial Sequence
  Synthetic Sequence
ggtgtgaaca

SEQ ID NO: 7075 - DNA, 10 bp, Artificial Sequence
  Synthetic Sequence
agggacatat

SEQ ID NO: 7076 - DNA, 10 bp, Artificial Sequence
  Synthetic Sequence
ccctgggtgt

SEQ ID NO: 7077 - DNA, 10 bp, Artificial Sequence
  Synthetic Sequence
ggacacgtat

SEQ ID NO: 7078 - DNA, 10 bp, Artificial Sequence
  Synthetic Sequence
acctgagcga

SEQ ID NO: 7079 - DNA, 10 bp, Artificial Sequence
  Synthetic Sequence
tcgtcgtcgc

SEQ ID NO: 7080 - DNA, 10 bp, Artificial Sequence
  Synthetic Sequence
tccaatcatc

SEQ ID NO: 7081 - DNA, 10 bp, Artificial Sequence
  Synthetic Sequence
acccttaatg

SEQ ID NO: 7082 - DNA, 10 bp, Artificial Sequence
  Synthetic Sequence
ccatcagctg

SEQ ID NO: 7083 - DNA, 10 bp, Artificial Sequence
  Synthetic Sequence
gtagccaagt

SEQ ID NO: 7084 - DNA, 10 bp, Artificial Sequence
  Synthetic Sequence
aaatatgtcc

SEQ ID NO: 7085 - DNA, 10 bp, Artificial Sequence
  Synthetic Sequence
gcttagcgcc

SEQ ID NO: 7086 - DNA, 10 bp, Artificial Sequence
  Synthetic Sequence
tgagggaccg

SEQ ID NO: 7087 - DNA, 10 bp, Artificial Sequence
  Synthetic Sequence
gttagctaag

SEQ ID NO: 7088 - DNA, 10 bp, Artificial Sequence
  Synthetic Sequence
tttggcccga

SEQ ID NO: 7089 - DNA, 10 bp, Artificial Sequence
  Synthetic Sequence
gccacagcag

SEQ ID NO: 7090 - DNA, 10 bp, Artificial Sequence
  Synthetic Sequence
ctaggatata

SEQ ID NO: 7091 - DNA, 10 bp, Artificial Sequence
  Synthetic Sequence
gatttgttct

SEQ ID NO: 7092 - DNA, 10 bp, Artificial Sequence
  Synthetic Sequence
ccgcttagtc

SEQ ID NO: 7093 - DNA, 10 bp, Artificial Sequence
  Synthetic Sequence
cagtcacttt

SEQ ID NO: 7094 - DNA, 10 bp, Artificial Sequence
  Synthetic Sequence
gatgactcaa

SEQ ID NO: 7095 - DNA, 10 bp, Artificial Sequence
  Synthetic Sequence
aggagctgag

SEQ ID NO: 7096 - DNA, 10 bp, Artificial Sequence
  Synthetic Sequence
tcgtaacgta

SEQ ID NO: 7097 - DNA, 10 bp, Artificial Sequence
  Synthetic Sequence
gtccaacctc

SEQ ID NO: 7098 - DNA, 10 bp, Artificial Sequence
  Synthetic Sequence
atttgatccg

SEQ ID NO: 7099 - DNA, 10 bp, Artificial Sequence
  Synthetic Sequence
gcgctttaag

SEQ ID NO: 7100 - DNA, 10 bp, Artificial Sequence
  Synthetic Sequence
ggcacgtgca

SEQ ID NO: 7101 - DNA, 10 bp, Artificial Sequence
  Synthetic Sequence
gaggaatgac

SEQ ID NO: 7102 - DNA, 10 bp, Artificial Sequence
  Synthetic Sequence
tcgctaggtg

SEQ ID NO: 7103 - DNA, 10 bp, Artificial Sequence
  Synthetic Sequence
ggttccaggt

SEQ ID NO: 7104 - DNA, 10 bp, Artificial Sequence
  Synthetic Sequence
gagtgatgaa

SEQ ID NO: 7105 - DNA, 10 bp, Artificial Sequence
  Synthetic Sequence
atgtacgtcc

SEQ ID NO: 7106 - DNA, 10 bp, Artificial Sequence
  Synthetic Sequence
tggaccgcaa

SEQ ID NO: 7107 - DNA, 10 bp, Artificial Sequence
  Synthetic Sequence
cctcgcatcg

SEQ ID NO: 7108 - DNA, 10 bp, Artificial Sequence
  Synthetic Sequence
cctacatatg

SEQ ID NO: 7109 - DNA, 10 bp, Artificial Sequence
  Synthetic Sequence
cccttagtca

SEQ ID NO: 7110 - DNA, 10 bp, Artificial Sequence
  Synthetic Sequence
cggtgacgta

SEQ ID NO: 7111 - DNA, 10 bp, Artificial Sequence
  Synthetic Sequence
tgaatcgccg

SEQ ID NO: 7112 - DNA, 10 bp, Artificial Sequence
  Synthetic Sequence
tacgctttca

SEQ ID NO: 7113 - DNA, 10 bp, Artificial Sequence
  Synthetic Sequence
gcatccacca

SEQ ID NO: 7114 - DNA, 10 bp, Artificial Sequence
  Synthetic Sequence
gtttgtaata

SEQ ID NO: 7115 - DNA, 10 bp, Artificial Sequence
  Synthetic Sequence
gttaaactcg

SEQ ID NO: 7116 - DNA, 10 bp, Artificial Sequence
  Synthetic Sequence
aacgtcttat

SEQ ID NO: 7117 - DNA, 10 bp, Artificial Sequence
  Synthetic Sequence
gaaccaacgc

SEQ ID NO: 7118 - DNA, 10 bp, Artificial Sequence
  Synthetic Sequence
tttcgttacg

SEQ ID NO: 7119 - DNA, 10 bp, Artificial Sequence
  Synthetic Sequence
gcacaacagc

SEQ ID NO: 7120 - DNA, 10 bp, Artificial Sequence
  Synthetic Sequence
tattaattaa

SEQ ID NO: 7121 - DNA, 10 bp, Artificial Sequence
  Synthetic Sequence
agcaacctgc

SEQ ID NO: 7122 - DNA, 10 bp, Artificial Sequence
  Synthetic Sequence
ctccctctgg

SEQ ID NO: 7123 - DNA, 10 bp, Artificial Sequence
  Synthetic Sequence
acctgtgcag

SEQ ID NO: 7124 - DNA, 10 bp, Artificial Sequence
  Synthetic Sequence
aacgcctgcg

SEQ ID NO: 7125 - DNA, 10 bp, Artificial Sequence
  Synthetic Sequence
agcaaatgga

SEQ ID NO: 7126 - DNA, 10 bp, Artificial Sequence
  Synthetic Sequence
gcgtgctgtg

SEQ ID NO: 7127 - DNA, 10 bp, Artificial Sequence
  Synthetic Sequence
catgtttgaa

SEQ ID NO: 7128 - DNA, 10 bp, Artificial Sequence
  Synthetic Sequence
agtatcttac

SEQ ID NO: 7129 - DNA, 10 bp, Artificial Sequence
  Synthetic Sequence
ccatccctac

SEQ ID NO: 7130 - DNA, 10 bp, Artificial Sequence
  Synthetic Sequence
acaggcttcc

SEQ ID NO: 7131 - DNA, 10 bp, Artificial Sequence
  Synthetic Sequence
tatcaagacg

SEQ ID NO: 7132 - DNA, 10 bp, Artificial Sequence
  Synthetic Sequence
gaccgagtgc

SEQ ID NO: 7133 - DNA, 10 bp, Artificial Sequence
  Synthetic Sequence
cagcaccact

SEQ ID NO: 7134 - DNA, 10 bp, Artificial Sequence
  Synthetic Sequence
agtaacagag

SEQ ID NO: 7135 - DNA, 10 bp, Artificial Sequence
  Synthetic Sequence
ccctttcggt

SEQ ID NO: 7136 - DNA, 10 bp, Artificial Sequence
  Synthetic Sequence
cccgcctaca

SEQ ID NO: 7137 - DNA, 10 bp, Artificial Sequence
  Synthetic Sequence
ccgttgcgtg

SEQ ID NO: 7138 - DNA, 10 bp, Artificial Sequence
  Synthetic Sequence
gtctaccaac

SEQ ID NO: 7139 - DNA, 10 bp, Artificial Sequence
  Synthetic Sequence
cgttctgacg

SEQ ID NO: 7140 - DNA, 10 bp, Artificial Sequence
  Synthetic Sequence
aagccactcg

SEQ ID NO: 7141 - DNA, 10 bp, Artificial Sequence
  Synthetic Sequence
tagaacgccc

SEQ ID NO: 7142 - DNA, 10 bp, Artificial Sequence
  Synthetic Sequence
ttctagggac

SEQ ID NO: 7143 - DNA, 10 bp, Artificial Sequence
  Synthetic Sequence
tctatttact

SEQ ID NO: 7144 - DNA, 10 bp, Artificial Sequence
  Synthetic Sequence
catgttcacc

SEQ ID NO: 7145 - DNA, 10 bp, Artificial Sequence
  Synthetic Sequence
cgaggtcgtg

SEQ ID NO: 7146 - DNA, 10 bp, Artificial Sequence
  Synthetic Sequence
ataggagacc

SEQ ID NO: 7147 - DNA, 10 bp, Artificial Sequence
  Synthetic Sequence
agagcggatg

SEQ ID NO: 7148 - DNA, 10 bp, Artificial Sequence
  Synthetic Sequence
cagcaacgcc

SEQ ID NO: 7149 - DNA, 10 bp, Artificial Sequence
  Synthetic Sequence
gccgtcatcg

SEQ ID NO: 7150 - DNA, 10 bp, Artificial Sequence
  Synthetic Sequence
tcgttatcat

SEQ ID NO: 7151 - DNA, 10 bp, Artificial Sequence
  Synthetic Sequence
ctaattaact

SEQ ID NO: 7152 - DNA, 10 bp, Artificial Sequence
  Synthetic Sequence
agcttattct

SEQ ID NO: 7153 - DNA, 10 bp, Artificial Sequence
  Synthetic Sequence
agaaaccacc

SEQ ID NO: 7154 - DNA, 10 bp, Artificial Sequence
  Synthetic Sequence
aagacggtga

SEQ ID NO: 7155 - DNA, 10 bp, Artificial Sequence
  Synthetic Sequence
ttgcccagtg

SEQ ID NO: 7156 - DNA, 10 bp, Artificial Sequence
  Synthetic Sequence
tgtagcgtag

SEQ ID NO: 7157 - DNA, 10 bp, Artificial Sequence
  Synthetic Sequence
cgcatgacag

SEQ ID NO: 7158 - DNA, 10 bp, Artificial Sequence
  Synthetic Sequence
ttaaggaatg

SEQ ID NO: 7159 - DNA, 10 bp, Artificial Sequence
  Synthetic Sequence
aactgactta

SEQ ID NO: 7160 - DNA, 10 bp, Artificial Sequence
  Synthetic Sequence
caccgcaagc

SEQ ID NO: 7161 - DNA, 10 bp, Artificial Sequence
  Synthetic Sequence
aagttgcatt

SEQ ID NO: 7162 - DNA, 10 bp, Artificial Sequence
  Synthetic Sequence
tagatctaga

SEQ ID NO: 7163 - DNA, 10 bp, Artificial Sequence
  Synthetic Sequence
ctttgcggtg

SEQ ID NO: 7164 - DNA, 10 bp, Artificial Sequence
  Synthetic Sequence
aacatcaaag

SEQ ID NO: 7165 - DNA, 10 bp, Artificial Sequence
  Synthetic Sequence
gtccctcaga

SEQ ID NO: 7166 - DNA, 10 bp, Artificial Sequence
  Synthetic Sequence
ggaagctaca

SEQ ID NO: 7167 - DNA, 10 bp, Artificial Sequence
  Synthetic Sequence
gatgccagcg

SEQ ID NO: 7168 - DNA, 10 bp, Artificial Sequence
  Synthetic Sequence
aaccctggcc

SEQ ID NO: 7169 - DNA, 10 bp, Artificial Sequence
  Synthetic Sequence
aattgtcggt

SEQ ID NO: 7170 - DNA, 10 bp, Artificial Sequence
  Synthetic Sequence
ggcgtgttct

SEQ ID NO: 7171 - DNA, 10 bp, Artificial Sequence
  Synthetic Sequence
ttcatgtccg

SEQ ID NO: 7172 - DNA, 10 bp, Artificial Sequence
  Synthetic Sequence
aatatcaatt

SEQ ID NO: 7173 - DNA, 10 bp, Artificial Sequence
  Synthetic Sequence
cgtctttctc

SEQ ID NO: 7174 - DNA, 10 bp, Artificial Sequence
  Synthetic Sequence
ataggactaa

SEQ ID NO: 7175 - DNA, 10 bp, Artificial Sequence
  Synthetic Sequence
gccatgtcgg

SEQ ID NO: 7176 - DNA, 10 bp, Artificial Sequence
  Synthetic Sequence
tgaattcaaa

SEQ ID NO: 7177 - DNA, 10 bp, Artificial Sequence
  Synthetic Sequence
aactgcttct

SEQ ID NO: 7178 - DNA, 10 bp, Artificial Sequence
  Synthetic Sequence
ttgctagtgt

SEQ ID NO: 7179 - DNA, 10 bp, Artificial Sequence
  Synthetic Sequence
tgcaactatg

SEQ ID NO: 7180 - DNA, 10 bp, Artificial Sequence
  Synthetic Sequence
tcaattgcaa

SEQ ID NO: 7181 - DNA, 10 bp, Artificial Sequence
  Synthetic Sequence
ttaagtcgtg

SEQ ID NO: 7182 - DNA, 10 bp, Artificial Sequence
  Synthetic Sequence
ggaaggtgcc

SEQ ID NO: 7183 - DNA, 10 bp, Artificial Sequence
  Synthetic Sequence
acgggttaca

SEQ ID NO: 7184 - DNA, 10 bp, Artificial Sequence
  Synthetic Sequence
gacagcttgg

SEQ ID NO: 7185 - DNA, 10 bp, Artificial Sequence
  Synthetic Sequence
tcagggtctg

SEQ ID NO: 7186 - DNA, 10 bp, Artificial Sequence
  Synthetic Sequence
cctaatcgtg

SEQ ID NO: 7187 - DNA, 10 bp, Artificial Sequence
  Synthetic Sequence
tgggcggtat

SEQ ID NO: 7188 - DNA, 10 bp, Artificial Sequence
  Synthetic Sequence
ctaaaccaag

SEQ ID NO: 7189 - DNA, 10 bp, Artificial Sequence
  Synthetic Sequence
gcaccttcga

SEQ ID NO: 7190 - DNA, 10 bp, Artificial Sequence
  Synthetic Sequence
ccgtggtgag

SEQ ID NO: 7191 - DNA, 10 bp, Artificial Sequence
  Synthetic Sequence
gttctctccc

SEQ ID NO: 7192 - DNA, 10 bp, Artificial Sequence
  Synthetic Sequence
tccttcgaca

SEQ ID NO: 7193 - DNA, 10 bp, Artificial Sequence
  Synthetic Sequence
gttggattgt

SEQ ID NO: 7194 - DNA, 10 bp, Artificial Sequence
  Synthetic Sequence
aagagaggcg

SEQ ID NO: 7195 - DNA, 10 bp, Artificial Sequence
  Synthetic Sequence
gtttccttct

SEQ ID NO: 7196 - DNA, 10 bp, Artificial Sequence
  Synthetic Sequence
tgtcgcggtc

SEQ ID NO: 7197 - DNA, 10 bp, Artificial Sequence
  Synthetic Sequence
ggcggacaga

SEQ ID NO: 7198 - DNA, 10 bp, Artificial Sequence
  Synthetic Sequence
ctaggctgtg

SEQ ID NO: 7199 - DNA, 10 bp, Artificial Sequence
  Synthetic Sequence
gttcgtgaca

SEQ ID NO: 7200 - DNA, 10 bp, Artificial Sequence
  Synthetic Sequence
tcaatgtttg

SEQ ID NO: 7201 - DNA, 10 bp, Artificial Sequence
  Synthetic Sequence
ttacttgcgg

SEQ ID NO: 7202 - DNA, 10 bp, Artificial Sequence
  Synthetic Sequence
ctttataaga

SEQ ID NO: 7203 - DNA, 10 bp, Artificial Sequence
  Synthetic Sequence
gctctgcagc

SEQ ID NO: 7204 - DNA, 10 bp, Artificial Sequence
  Synthetic Sequence
cagaggtaac

SEQ ID NO: 7205 - DNA, 10 bp, Artificial Sequence
  Synthetic Sequence
tacagaagta

SEQ ID NO: 7206 - DNA, 10 bp, Artificial Sequence
  Synthetic Sequence
gtttgcggcc

SEQ ID NO: 7207 - DNA, 10 bp, Artificial Sequence
  Synthetic Sequence
ttcccataca

SEQ ID NO: 7208 - DNA, 10 bp, Artificial Sequence
  Synthetic Sequence
acctacaaca

SEQ ID NO: 7209 - DNA, 10 bp, Artificial Sequence
  Synthetic Sequence
ttcaaaccat

SEQ ID NO: 7210 - DNA, 10 bp, Artificial Sequence
  Synthetic Sequence
aatcggacgt

SEQ ID NO: 7211 - DNA, 10 bp, Artificial Sequence
  Synthetic Sequence
gtccgaacaa

SEQ ID NO: 7212 - DNA, 10 bp, Artificial Sequence
  Synthetic Sequence
gtaatttgcc

SEQ ID NO: 7213 - DNA, 10 bp, Artificial Sequence
  Synthetic Sequence
gttccaaaga

SEQ ID NO: 7214 - DNA, 10 bp, Artificial Sequence
  Synthetic Sequence
ggagttaaac

SEQ ID NO: 7215 - DNA, 10 bp, Artificial Sequence
  Synthetic Sequence
aagcgtcaac

SEQ ID NO: 7216 - DNA, 10 bp, Artificial Sequence
  Synthetic Sequence
ccggctgatg

SEQ ID NO: 7217 - DNA, 10 bp, Artificial Sequence
  Synthetic Sequence
agacgcagcg

SEQ ID NO: 7218 - DNA, 10 bp, Artificial Sequence
  Synthetic Sequence
aaacgtacca

SEQ ID NO: 7219 - DNA, 10 bp, Artificial Sequence
  Synthetic Sequence
cggtgtaaac

SEQ ID NO: 7220 - DNA, 10 bp, Artificial Sequence
  Synthetic Sequence
catgcgccta

SEQ ID NO: 7221 - DNA, 10 bp, Artificial Sequence
  Synthetic Sequence
atttgaccgc

SEQ ID NO: 7222 - DNA, 10 bp, Artificial Sequence
  Synthetic Sequence
gcagagcctc

SEQ ID NO: 7223 - DNA, 10 bp, Artificial Sequence
  Synthetic Sequence
tttggtagac

SEQ ID NO: 7224 - DNA, 10 bp, Artificial Sequence
  Synthetic Sequence
actaaattaa

SEQ ID NO: 7225 - DNA, 10 bp, Artificial Sequence
  Synthetic Sequence
taacacactc

SEQ ID NO: 7226 - DNA, 10 bp, Artificial Sequence
  Synthetic Sequence
gtatgagttg

SEQ ID NO: 7227 - DNA, 10 bp, Artificial Sequence
  Synthetic Sequence
actgttggct

SEQ ID NO: 7228 - DNA, 10 bp, Artificial Sequence
  Synthetic Sequence
gtagcgcgac

SEQ ID NO: 7229 - DNA, 10 bp, Artificial Sequence
  Synthetic Sequence
ctagtgtagg

SEQ ID NO: 7230 - DNA, 10 bp, Artificial Sequence
  Synthetic Sequence
ccgtcttcta

SEQ ID NO: 7231 - DNA, 10 bp, Artificial Sequence
  Synthetic Sequence
ctgagtacct

SEQ ID NO: 7232 - DNA, 10 bp, Artificial Sequence
  Synthetic Sequence
gggtaccggt

SEQ ID NO: 7233 - DNA, 10 bp, Artificial Sequence
  Synthetic Sequence
ctcgtgctgt

SEQ ID NO: 7234 - DNA, 10 bp, Artificial Sequence
  Synthetic Sequence
tccacagatg

SEQ ID NO: 7235 - DNA, 10 bp, Artificial Sequence
  Synthetic Sequence
gattatctga

SEQ ID NO: 7236 - DNA, 10 bp, Artificial Sequence
  Synthetic Sequence
cctcgtcatg

SEQ ID NO: 7237 - DNA, 10 bp, Artificial Sequence
  Synthetic Sequence
gtagtgacgc

SEQ ID NO: 7238 - DNA, 10 bp, Artificial Sequence
  Synthetic Sequence
ccggtgaagg

SEQ ID NO: 7239 - DNA, 10 bp, Artificial Sequence
  Synthetic Sequence
ttgagtcggc

SEQ ID NO: 7240 - DNA, 10 bp, Artificial Sequence
  Synthetic Sequence
cgccgattgg

SEQ ID NO: 7241 - DNA, 10 bp, Artificial Sequence
  Synthetic Sequence
aaatacgcat

SEQ ID NO: 7242 - DNA, 10 bp, Artificial Sequence
  Synthetic Sequence
atgttaatgt

SEQ ID NO: 7243 - DNA, 10 bp, Artificial Sequence
  Synthetic Sequence
ttcagcacga

SEQ ID NO: 7244 - DNA, 10 bp, Artificial Sequence
  Synthetic Sequence
aagactatag

SEQ ID NO: 7245 - DNA, 10 bp, Artificial Sequence
  Synthetic Sequence
acggtcatct

SEQ ID NO: 7246 - DNA, 10 bp, Artificial Sequence
  Synthetic Sequence
cgagattcgc

SEQ ID NO: 7247 - DNA, 10 bp, Artificial Sequence
  Synthetic Sequence
tgaaacgagt

SEQ ID NO: 7248 - DNA, 10 bp, Artificial Sequence
  Synthetic Sequence
ctctataaac

SEQ ID NO: 7249 - DNA, 10 bp, Artificial Sequence
  Synthetic Sequence
gtgctgacgg

SEQ ID NO: 7250 - DNA, 10 bp, Artificial Sequence
  Synthetic Sequence
tatatttccc

SEQ ID NO: 7251 - DNA, 10 bp, Artificial Sequence
  Synthetic Sequence
cccatataga

SEQ ID NO: 7252 - DNA, 10 bp, Artificial Sequence
  Synthetic Sequence
tacattataa

SEQ ID NO: 7253 - DNA, 10 bp, Artificial Sequence
  Synthetic Sequence
cctacgaaag

SEQ ID NO: 7254 - DNA, 10 bp, Artificial Sequence
  Synthetic Sequence
actctgctcc

SEQ ID NO: 7255 - DNA, 10 bp, Artificial Sequence
  Synthetic Sequence
cattatttca

SEQ ID NO: 7256 - DNA, 10 bp, Artificial Sequence
  Synthetic Sequence
agacgttaac

SEQ ID NO: 7257 - DNA, 10 bp, Artificial Sequence
  Synthetic Sequence
cttagcgtac

SEQ ID NO: 7258 - DNA, 10 bp, Artificial Sequence
  Synthetic Sequence
caataactca

SEQ ID NO: 7259 - DNA, 10 bp, Artificial Sequence
  Synthetic Sequence
ggcagttagc

SEQ ID NO: 7260 - DNA, 10 bp, Artificial Sequence
  Synthetic Sequence
gcaaacgccg

SEQ ID NO: 7261 - DNA, 10 bp, Artificial Sequence
  Synthetic Sequence
cggcgagtga

SEQ ID NO: 7262 - DNA, 10 bp, Artificial Sequence
  Synthetic Sequence
tcctcgttac

SEQ ID NO: 7263 - DNA, 10 bp, Artificial Sequence
  Synthetic Sequence
agttatggat

SEQ ID NO: 7264 - DNA, 10 bp, Artificial Sequence
  Synthetic Sequence
gccctataaa

SEQ ID NO: 7265 - DNA, 10 bp, Artificial Sequence
  Synthetic Sequence
gtgcacgcgt

SEQ ID NO: 7266 - DNA, 10 bp, Artificial Sequence
  Synthetic Sequence
aaatgcgagt

SEQ ID NO: 7267 - DNA, 10 bp, Artificial Sequence
  Synthetic Sequence
ctagcgctgg

SEQ ID NO: 7268 - DNA, 10 bp, Artificial Sequence
  Synthetic Sequence
gggtgatgtt

SEQ ID NO: 7269 - DNA, 10 bp, Artificial Sequence
  Synthetic Sequence
atttgccctg

SEQ ID NO: 7270 - DNA, 10 bp, Artificial Sequence
  Synthetic Sequence
ctgcaagttt

SEQ ID NO: 7271 - DNA, 10 bp, Artificial Sequence
  Synthetic Sequence
ttcaccggca

SEQ ID NO: 7272 - DNA, 10 bp, Artificial Sequence
  Synthetic Sequence
tctcatcctg

SEQ ID NO: 7273 - DNA, 10 bp, Artificial Sequence
  Synthetic Sequence
tgttagccag

SEQ ID NO: 7274 - DNA, 10 bp, Artificial Sequence
  Synthetic Sequence
tagattacta

SEQ ID NO: 7275 - DNA, 10 bp, Artificial Sequence
  Synthetic Sequence
tgtcaatgga

SEQ ID NO: 7276 - DNA, 10 bp, Artificial Sequence
  Synthetic Sequence
cgccgcttta

SEQ ID NO: 7277 - DNA, 10 bp, Artificial Sequence
  Synthetic Sequence
ggactacgat

SEQ ID NO: 7278 - DNA, 10 bp, Artificial Sequence
  Synthetic Sequence
ggaggttgcg

SEQ ID NO: 7279 - DNA, 10 bp, Artificial Sequence
  Synthetic Sequence
atcagaccac

SEQ ID NO: 7280 - DNA, 10 bp, Artificial Sequence
  Synthetic Sequence
ctgcgcacac

SEQ ID NO: 7281 - DNA, 10 bp, Artificial Sequence
  Synthetic Sequence
atttacattt

SEQ ID NO: 7282 - DNA, 10 bp, Artificial Sequence
  Synthetic Sequence
cctaagcggc

SEQ ID NO: 7283 - DNA, 10 bp, Artificial Sequence
  Synthetic Sequence
attgggtggc

SEQ ID NO: 7284 - DNA, 10 bp, Artificial Sequence
  Synthetic Sequence
ccctatatgt

SEQ ID NO: 7285 - DNA, 10 bp, Artificial Sequence
  Synthetic Sequence
tcccatagtc

SEQ ID NO: 7286 - DNA, 10 bp, Artificial Sequence
  Synthetic Sequence
tgggagtaat

SEQ ID NO: 7287 - DNA, 10 bp, Artificial Sequence
  Synthetic Sequence
ttggtgcgca

SEQ ID NO: 7288 - DNA, 10 bp, Artificial Sequence
  Synthetic Sequence
ctttctgcac

SEQ ID NO: 7289 - DNA, 10 bp, Artificial Sequence
  Synthetic Sequence
cgggcgtgtt

SEQ ID NO: 7290 - DNA, 10 bp, Artificial Sequence
  Synthetic Sequence
tgtttgaacc

SEQ ID NO: 7291 - DNA, 10 bp, Artificial Sequence
  Synthetic Sequence
agaaagaaag

SEQ ID NO: 7292 - DNA, 10 bp, Artificial Sequence
  Synthetic Sequence
cctgagactg

SEQ ID NO: 7293 - DNA, 10 bp, Artificial Sequence
  Synthetic Sequence
gctaacagtc

SEQ ID NO: 7294 - DNA, 10 bp, Artificial Sequence
  Synthetic Sequence
tgtaagtcgg

SEQ ID NO: 7295 - DNA, 10 bp, Artificial Sequence
  Synthetic Sequence
tgcgatgcga

SEQ ID NO: 7296 - DNA, 10 bp, Artificial Sequence
  Synthetic Sequence
ctgctcgctg

SEQ ID NO: 7297 - DNA, 10 bp, Artificial Sequence
  Synthetic Sequence
ctatgattgc

SEQ ID NO: 7298 - DNA, 10 bp, Artificial Sequence
  Synthetic Sequence
ttcttgtcat

SEQ ID NO: 7299 - DNA, 10 bp, Artificial Sequence
  Synthetic Sequence
cactccagag

SEQ ID NO: 7300 - DNA, 10 bp, Artificial Sequence
  Synthetic Sequence
atcgggagcc

SEQ ID NO: 7301 - DNA, 10 bp, Artificial Sequence
  Synthetic Sequence
agctgtcgtg

SEQ ID NO: 7302 - DNA, 10 bp, Artificial Sequence
  Synthetic Sequence
ttacataaac

SEQ ID NO: 7303 - DNA, 10 bp, Artificial Sequence
  Synthetic Sequence
aagagctgta

SEQ ID NO: 7304 - DNA, 10 bp, Artificial Sequence
  Synthetic Sequence
tgtgggatga

SEQ ID NO: 7305 - DNA, 10 bp, Artificial Sequence
  Synthetic Sequence
agaatccttc

SEQ ID NO: 7306 - DNA, 10 bp, Artificial Sequence
  Synthetic Sequence
gctagccata

SEQ ID NO: 7307 - DNA, 10 bp, Artificial Sequence
  Synthetic Sequence
gctaacacga

SEQ ID NO: 7308 - DNA, 10 bp, Artificial Sequence
  Synthetic Sequence
caggtgctgg

SEQ ID NO: 7309 - DNA, 10 bp, Artificial Sequence
  Synthetic Sequence
cggctcaatc

SEQ ID NO: 7310 - DNA, 10 bp, Artificial Sequence
  Synthetic Sequence
cttgaatcat

SEQ ID NO: 7311 - DNA, 10 bp, Artificial Sequence
  Synthetic Sequence
aggcaggtgt

SEQ ID NO: 7312 - DNA, 10 bp, Artificial Sequence
  Synthetic Sequence
aaacccgaga

SEQ ID NO: 7313 - DNA, 10 bp, Artificial Sequence
  Synthetic Sequence
gctaactaat

SEQ ID NO: 7314 - DNA, 10 bp, Artificial Sequence
  Synthetic Sequence
tttagaaaga

SEQ ID NO: 7315 - DNA, 10 bp, Artificial Sequence
  Synthetic Sequence
aggtattatc

SEQ ID NO: 7316 - DNA, 10 bp, Artificial Sequence
  Synthetic Sequence
ccactgcgct

SEQ ID NO: 7317 - DNA, 10 bp, Artificial Sequence
  Synthetic Sequence
tccacatact

SEQ ID NO: 7318 - DNA, 10 bp, Artificial Sequence
  Synthetic Sequence
tctaaggccc

SEQ ID NO: 7319 - DNA, 10 bp, Artificial Sequence
  Synthetic Sequence
tatccggtca

SEQ ID NO: 7320 - DNA, 10 bp, Artificial Sequence
  Synthetic Sequence
cccgttacgt

SEQ ID NO: 7321 - DNA, 10 bp, Artificial Sequence
  Synthetic Sequence
tggtcggatg

SEQ ID NO: 7322 - DNA, 10 bp, Artificial Sequence
  Synthetic Sequence
attggtgtgt

SEQ ID NO: 7323 - DNA, 10 bp, Artificial Sequence
  Synthetic Sequence
acgcgcaaac

SEQ ID NO: 7324 - DNA, 10 bp, Artificial Sequence
  Synthetic Sequence
aagcggagag

SEQ ID NO: 7325 - DNA, 10 bp, Artificial Sequence
  Synthetic Sequence
tgtgtacatg

SEQ ID NO: 7326 - DNA, 10 bp, Artificial Sequence
  Synthetic Sequence
taggtcacga

SEQ ID NO: 7327 - DNA, 10 bp, Artificial Sequence
  Synthetic Sequence
agttgatgtg

SEQ ID NO: 7328 - DNA, 10 bp, Artificial Sequence
  Synthetic Sequence
caattcgccg

SEQ ID NO: 7329 - DNA, 10 bp, Artificial Sequence
  Synthetic Sequence
atagttggta

SEQ ID NO: 7330 - DNA, 10 bp, Artificial Sequence
  Synthetic Sequence
agtcgtcaaa

SEQ ID NO: 7331 - DNA, 10 bp, Artificial Sequence
  Synthetic Sequence
ggtacgtgtt

SEQ ID NO: 7332 - DNA, 10 bp, Artificial Sequence
  Synthetic Sequence
agtcgatgac

SEQ ID NO: 7333 - DNA, 10 bp, Artificial Sequence
  Synthetic Sequence
cttcgtgtta

SEQ ID NO: 7334 - DNA, 10 bp, Artificial Sequence
  Synthetic Sequence
cacatacacc

SEQ ID NO: 7335 - DNA, 10 bp, Artificial Sequence
  Synthetic Sequence
gcccttgctc

SEQ ID NO: 7336 - DNA, 10 bp, Artificial Sequence
  Synthetic Sequence
tgttcgggca

SEQ ID NO: 7337 - DNA, 10 bp, Artificial Sequence
  Synthetic Sequence
tcgcgatcgt

SEQ ID NO: 7338 - DNA, 10 bp, Artificial Sequence
  Synthetic Sequence
caagccgaat

SEQ ID NO: 7339 - DNA, 10 bp, Artificial Sequence
  Synthetic Sequence
atgaacctac

SEQ ID NO: 7340 - DNA, 10 bp, Artificial Sequence
  Synthetic Sequence
tgcctagagg

SEQ ID NO: 7341 - DNA, 10 bp, Artificial Sequence
  Synthetic Sequence
gcccggattc

SEQ ID NO: 7342 - DNA, 10 bp, Artificial Sequence
  Synthetic Sequence
ctgctgcgat

SEQ ID NO: 7343 - DNA, 10 bp, Artificial Sequence
  Synthetic Sequence
ggcgaatgct

SEQ ID NO: 7344 - DNA, 10 bp, Artificial Sequence
  Synthetic Sequence
tagtcgtgct

SEQ ID NO: 7345 - DNA, 10 bp, Artificial Sequence
  Synthetic Sequence
gttctgttat

SEQ ID NO: 7346 - DNA, 10 bp, Artificial Sequence
  Synthetic Sequence
acggacttca

SEQ ID NO: 7347 - DNA, 10 bp, Artificial Sequence
  Synthetic Sequence
agcacgtcag

SEQ ID NO: 7348 - DNA, 10 bp, Artificial Sequence
  Synthetic Sequence
catccaagtg

SEQ ID NO: 7349 - DNA, 10 bp, Artificial Sequence
  Synthetic Sequence
ttgcgagaag

SEQ ID NO: 7350 - DNA, 10 bp, Artificial Sequence
  Synthetic Sequence
tattacagta

SEQ ID NO: 7351 - DNA, 10 bp, Artificial Sequence
  Synthetic Sequence
ggcatccttg

SEQ ID NO: 7352 - DNA, 10 bp, Artificial Sequence
  Synthetic Sequence
cgcacgaaac

SEQ ID NO: 7353 - DNA, 10 bp, Artificial Sequence
  Synthetic Sequence
aatattgtca

SEQ ID NO: 7354 - DNA, 10 bp, Artificial Sequence
  Synthetic Sequence
cagagctctg

SEQ ID NO: 7355 - DNA, 10 bp, Artificial Sequence
  Synthetic Sequence
tcgccgaaac

SEQ ID NO: 7356 - DNA, 10 bp, Artificial Sequence
  Synthetic Sequence
cccatcgtgg

SEQ ID NO: 7357 - DNA, 10 bp, Artificial Sequence
  Synthetic Sequence
agacatccat

SEQ ID NO: 7358 - DNA, 10 bp, Artificial Sequence
  Synthetic Sequence
ttcgtttgca

SEQ ID NO: 7359 - DNA, 10 bp, Artificial Sequence
  Synthetic Sequence
cctgcggtaa

SEQ ID NO: 7360 - DNA, 10 bp, Artificial Sequence
  Synthetic Sequence
gcacgaacca

SEQ ID NO: 7361 - DNA, 10 bp, Artificial Sequence
  Synthetic Sequence
tggagatgaa

SEQ ID NO: 7362 - DNA, 10 bp, Artificial Sequence
  Synthetic Sequence
atgggtccat

SEQ ID NO: 7363 - DNA, 10 bp, Artificial Sequence
  Synthetic Sequence
taatagagca

SEQ ID NO: 7364 - DNA, 10 bp, Artificial Sequence
  Synthetic Sequence
atacgagtcg

SEQ ID NO: 7365 - DNA, 10 bp, Artificial Sequence
  Synthetic Sequence
tgtcgattcg

SEQ ID NO: 7366 - DNA, 10 bp, Artificial Sequence
  Synthetic Sequence
tgcaggcggt

SEQ ID NO: 7367 - DNA, 10 bp, Artificial Sequence
  Synthetic Sequence
tcggtccgag

SEQ ID NO: 7368 - DNA, 10 bp, Artificial Sequence
  Synthetic Sequence
gaggaggctg

SEQ ID NO: 7369 - DNA, 10 bp, Artificial Sequence
  Synthetic Sequence
gcgaccgaga

SEQ ID NO: 7370 - DNA, 10 bp, Artificial Sequence
  Synthetic Sequence
tacggatatg

SEQ ID NO: 7371 - DNA, 10 bp, Artificial Sequence
  Synthetic Sequence
cgctcgtcaa

SEQ ID NO: 7372 - DNA, 10 bp, Artificial Sequence
  Synthetic Sequence
gacggtgcag

SEQ ID NO: 7373 - DNA, 10 bp, Artificial Sequence
  Synthetic Sequence
tcttccaagt

SEQ ID NO: 7374 - DNA, 10 bp, Artificial Sequence
  Synthetic Sequence
tgatatttcc

SEQ ID NO: 7375 - DNA, 10 bp, Artificial Sequence
  Synthetic Sequence
gattggtatg

SEQ ID NO: 7376 - DNA, 10 bp, Artificial Sequence
  Synthetic Sequence
ccggtcgttt

SEQ ID NO: 7377 - DNA, 10 bp, Artificial Sequence
  Synthetic Sequence
tgtttcctta

SEQ ID NO: 7378 - DNA, 10 bp, Artificial Sequence
  Synthetic Sequence
cacaacgcgt

SEQ ID NO: 7379 - DNA, 10 bp, Artificial Sequence
  Synthetic Sequence
gcaagagcgg

SEQ ID NO: 7380 - DNA, 10 bp, Artificial Sequence
  Synthetic Sequence
gagtcacgtg

SEQ ID NO: 7381 - DNA, 10 bp, Artificial Sequence
  Synthetic Sequence
ggaccgaata

SEQ ID NO: 7382 - DNA, 10 bp, Artificial Sequence
  Synthetic Sequence
agtctcatag

SEQ ID NO: 7383 - DNA, 10 bp, Artificial Sequence
  Synthetic Sequence
cctagaagtt

SEQ ID NO: 7384 - DNA, 10 bp, Artificial Sequence
  Synthetic Sequence
gcgtggctat

SEQ ID NO: 7385 - DNA, 10 bp, Artificial Sequence
  Synthetic Sequence
tgactcaagt

SEQ ID NO: 7386 - DNA, 10 bp, Artificial Sequence
  Synthetic Sequence
cgggttcagt

SEQ ID NO: 7387 - DNA, 10 bp, Artificial Sequence
  Synthetic Sequence
agattggtct

SEQ ID NO: 7388 - DNA, 10 bp, Artificial Sequence
  Synthetic Sequence
taagctagcc

SEQ ID NO: 7389 - DNA, 10 bp, Artificial Sequence
  Synthetic Sequence
aatcccacaa

SEQ ID NO: 7390 - DNA, 10 bp, Artificial Sequence
  Synthetic Sequence
ttggagggag

SEQ ID NO: 7391 - DNA, 10 bp, Artificial Sequence
  Synthetic Sequence
tctacttcta

SEQ ID NO: 7392 - DNA, 10 bp, Artificial Sequence
  Synthetic Sequence
ttgcctcaca

SEQ ID NO: 7393 - DNA, 10 bp, Artificial Sequence
  Synthetic Sequence
agttcggtgc

SEQ ID NO: 7394 - DNA, 10 bp, Artificial Sequence
  Synthetic Sequence
agcacaccgc

SEQ ID NO: 7395 - DNA, 10 bp, Artificial Sequence
  Synthetic Sequence
ttcggcaccg

SEQ ID NO: 7396 - DNA, 10 bp, Artificial Sequence
  Synthetic Sequence
gttggaggag

SEQ ID NO: 7397 - DNA, 10 bp, Artificial Sequence
  Synthetic Sequence
tagtcctcgg

SEQ ID NO: 7398 - DNA, 10 bp, Artificial Sequence
  Synthetic Sequence
tggtagtgaa

SEQ ID NO: 7399 - DNA, 10 bp, Artificial Sequence
  Synthetic Sequence
tccataccaa

SEQ ID NO: 7400 - DNA, 10 bp, Artificial Sequence
  Synthetic Sequence
ctgagatcgg

SEQ ID NO: 7401 - DNA, 10 bp, Artificial Sequence
  Synthetic Sequence
cggcatgtgg

SEQ ID NO: 7402 - DNA, 10 bp, Artificial Sequence
  Synthetic Sequence
tgtctttggg

SEQ ID NO: 7403 - DNA, 10 bp, Artificial Sequence
  Synthetic Sequence
atgtgtaaag

SEQ ID NO: 7404 - DNA, 10 bp, Artificial Sequence
  Synthetic Sequence
agccaaagaa

SEQ ID NO: 7405 - DNA, 10 bp, Artificial Sequence
  Synthetic Sequence
ggaactcatt

SEQ ID NO: 7406 - DNA, 10 bp, Artificial Sequence
  Synthetic Sequence
ggtgccatca

SEQ ID NO: 7407 - DNA, 10 bp, Artificial Sequence
  Synthetic Sequence
ccgaatatag

SEQ ID NO: 7408 - DNA, 10 bp, Artificial Sequence
  Synthetic Sequence
tataatgaac

SEQ ID NO: 7409 - DNA, 10 bp, Artificial Sequence
  Synthetic Sequence
ggaccggtga

SEQ ID NO: 7410 - DNA, 10 bp, Artificial Sequence
  Synthetic Sequence
tcaagaagga

SEQ ID NO: 7411 - DNA, 10 bp, Artificial Sequence
  Synthetic Sequence
tatctaacta

SEQ ID NO: 7412 - DNA, 10 bp, Artificial Sequence
  Synthetic Sequence
gcgtttagga

SEQ ID NO: 7413 - DNA, 10 bp, Artificial Sequence
  Synthetic Sequence
tgtgagaccc

SEQ ID NO: 7414 - DNA, 10 bp, Artificial Sequence
  Synthetic Sequence
cgggactaca

SEQ ID NO: 7415 - DNA, 10 bp, Artificial Sequence
  Synthetic Sequence
tgccgacgac

SEQ ID NO: 7416 - DNA, 10 bp, Artificial Sequence
  Synthetic Sequence
aatacattgt

SEQ ID NO: 7417 - DNA, 10 bp, Artificial Sequence
  Synthetic Sequence
actggtccca

SEQ ID NO: 7418 - DNA, 10 bp, Artificial Sequence
  Synthetic Sequence
tgcagatctt

SEQ ID NO: 7419 - DNA, 10 bp, Artificial Sequence
  Synthetic Sequence
cccagctatg

SEQ ID NO: 7420 - DNA, 10 bp, Artificial Sequence
  Synthetic Sequence
ccgatcacca

SEQ ID NO: 7421 - DNA, 10 bp, Artificial Sequence
  Synthetic Sequence
agcaaatctc

SEQ ID NO: 7422 - DNA, 10 bp, Artificial Sequence
  Synthetic Sequence
cgagtccctc

SEQ ID NO: 7423 - DNA, 10 bp, Artificial Sequence
  Synthetic Sequence
gattgcagac

SEQ ID NO: 7424 - DNA, 10 bp, Artificial Sequence
  Synthetic Sequence
ttattcagat

SEQ ID NO: 7425 - DNA, 10 bp, Artificial Sequence
  Synthetic Sequence
tgcgcatacc

SEQ ID NO: 7426 - DNA, 10 bp, Artificial Sequence
  Synthetic Sequence
cctctgtcgc

SEQ ID NO: 7427 - DNA, 10 bp, Artificial Sequence
  Synthetic Sequence
cggcagcatg

SEQ ID NO: 7428 - DNA, 10 bp, Artificial Sequence
  Synthetic Sequence
tgtaaattgt

SEQ ID NO: 7429 - DNA, 10 bp, Artificial Sequence
  Synthetic Sequence
tctgtcttgt

SEQ ID NO: 7430 - DNA, 10 bp, Artificial Sequence
  Synthetic Sequence
ccgcgcctta

SEQ ID NO: 7431 - DNA, 10 bp, Artificial Sequence
  Synthetic Sequence
cagtcaaagc

SEQ ID NO: 7432 - DNA, 10 bp, Artificial Sequence
  Synthetic Sequence
attatcagtc

SEQ ID NO: 7433 - DNA, 10 bp, Artificial Sequence
  Synthetic Sequence
attgaagccg

SEQ ID NO: 7434 - DNA, 10 bp, Artificial Sequence
  Synthetic Sequence
actagagctc

SEQ ID NO: 7435 - DNA, 10 bp, Artificial Sequence
  Synthetic Sequence
tcttcttgaa

SEQ ID NO: 7436 - DNA, 10 bp, Artificial Sequence
  Synthetic Sequence
caacccgacg

SEQ ID NO: 7437 - DNA, 10 bp, Artificial Sequence
  Synthetic Sequence
cagtaccgca

SEQ ID NO: 7438 - DNA, 10 bp, Artificial Sequence
  Synthetic Sequence
aacccatacc

SEQ ID NO: 7439 - DNA, 10 bp, Artificial Sequence
  Synthetic Sequence
tccacaatat

SEQ ID NO: 7440 - DNA, 10 bp, Artificial Sequence
  Synthetic Sequence
ttcatactac

SEQ ID NO: 7441 - DNA, 10 bp, Artificial Sequence
  Synthetic Sequence
ctgaacgtca

SEQ ID NO: 7442 - DNA, 10 bp, Artificial Sequence
  Synthetic Sequence
ggcttggcca

SEQ ID NO: 7443 - DNA, 10 bp, Artificial Sequence
  Synthetic Sequence
ccaaatggcc

SEQ ID NO: 7444 - DNA, 10 bp, Artificial Sequence
  Synthetic Sequence
actagcgcaa

SEQ ID NO: 7445 - DNA, 10 bp, Artificial Sequence
  Synthetic Sequence
atgagggtct

SEQ ID NO: 7446 - DNA, 10 bp, Artificial Sequence
  Synthetic Sequence
ctagcataag

SEQ ID NO: 7447 - DNA, 10 bp, Artificial Sequence
  Synthetic Sequence
agaacgaaca

SEQ ID NO: 7448 - DNA, 10 bp, Artificial Sequence
  Synthetic Sequence
ttcgaagtta

SEQ ID NO: 7449 - DNA, 10 bp, Artificial Sequence
  Synthetic Sequence
cctatttctg

SEQ ID NO: 7450 - DNA, 10 bp, Artificial Sequence
  Synthetic Sequence
ggtcaggagg

SEQ ID NO: 7451 - DNA, 10 bp, Artificial Sequence
  Synthetic Sequence
tgagcgcgct

SEQ ID NO: 7452 - DNA, 10 bp, Artificial Sequence
  Synthetic Sequence
atgaaagatc

SEQ ID NO: 7453 - DNA, 10 bp, Artificial Sequence
  Synthetic Sequence
aattacgagg

SEQ ID NO: 7454 - DNA, 10 bp, Artificial Sequence
  Synthetic Sequence
tcagattcga

SEQ ID NO: 7455 - DNA, 10 bp, Artificial Sequence
  Synthetic Sequence
gggacttaac

SEQ ID NO: 7456 - DNA, 10 bp, Artificial Sequence
  Synthetic Sequence
cgtacaagaa

SEQ ID NO: 7457 - DNA, 10 bp, Artificial Sequence
  Synthetic Sequence
ttgtaccagt

SEQ ID NO: 7458 - DNA, 10 bp, Artificial Sequence
  Synthetic Sequence
gacggattta

SEQ ID NO: 7459 - DNA, 10 bp, Artificial Sequence
  Synthetic Sequence
ctgtcgttga

SEQ ID NO: 7460 - DNA, 10 bp, Artificial Sequence
  Synthetic Sequence
cgaaggaggc

SEQ ID NO: 7461 - DNA, 10 bp, Artificial Sequence
  Synthetic Sequence
tgggttcttc

SEQ ID NO: 7462 - DNA, 10 bp, Artificial Sequence
  Synthetic Sequence
gcatgaaaga

SEQ ID NO: 7463 - DNA, 10 bp, Artificial Sequence
  Synthetic Sequence
tctatggttc

SEQ ID NO: 7464 - DNA, 10 bp, Artificial Sequence
  Synthetic Sequence
cgcactatca

SEQ ID NO: 7465 - DNA, 10 bp, Artificial Sequence
  Synthetic Sequence
gaatgggccc

SEQ ID NO: 7466 - DNA, 10 bp, Artificial Sequence
  Synthetic Sequence
cctcaaacag

SEQ ID NO: 7467 - DNA, 10 bp, Artificial Sequence
  Synthetic Sequence
atcgatgcat

SEQ ID NO: 7468 - DNA, 10 bp, Artificial Sequence
  Synthetic Sequence
agagtgtccg

SEQ ID NO: 7469 - DNA, 10 bp, Artificial Sequence
  Synthetic Sequence
tgagaagttt

SEQ ID NO: 7470 - DNA, 10 bp, Artificial Sequence
  Synthetic Sequence
tagctaccaa

SEQ ID NO: 7471 - DNA, 10 bp, Artificial Sequence
  Synthetic Sequence
tgcccgtcca

SEQ ID NO: 7472 - DNA, 10 bp, Artificial Sequence
  Synthetic Sequence
gattatcgtc

SEQ ID NO: 7473 - DNA, 10 bp, Artificial Sequence
  Synthetic Sequence
tcctaggaat

SEQ ID NO: 7474 - DNA, 10 bp, Artificial Sequence
  Synthetic Sequence
tcaaaccgta

SEQ ID NO: 7475 - DNA, 10 bp, Artificial Sequence
  Synthetic Sequence
atcacaatcg

SEQ ID NO: 7476 - DNA, 10 bp, Artificial Sequence
  Synthetic Sequence
cagctaaacg

SEQ ID NO: 7477 - DNA, 10 bp, Artificial Sequence
  Synthetic Sequence
atgtaacaat

SEQ ID NO: 7478 - DNA, 10 bp, Artificial Sequence
  Synthetic Sequence
tcgtcctaca

SEQ ID NO: 7479 - DNA, 10 bp, Artificial Sequence
  Synthetic Sequence
cgattcctca

SEQ ID NO: 7480 - DNA, 10 bp, Artificial Sequence
  Synthetic Sequence
aatctccttt

SEQ ID NO: 7481 - DNA, 10 bp, Artificial Sequence
  Synthetic Sequence
cagcggttcc

SEQ ID NO: 7482 - DNA, 10 bp, Artificial Sequence
  Synthetic Sequence
gcggcaaact

SEQ ID NO: 7483 - DNA, 10 bp, Artificial Sequence
  Synthetic Sequence
tctgaccgac

SEQ ID NO: 7484 - DNA, 10 bp, Artificial Sequence
  Synthetic Sequence
gatggtctac

SEQ ID NO: 7485 - DNA, 10 bp, Artificial Sequence
  Synthetic Sequence
tactgacggt

SEQ ID NO: 7486 - DNA, 10 bp, Artificial Sequence
  Synthetic Sequence
ttccagactt

SEQ ID NO: 7487 - DNA, 10 bp, Artificial Sequence
  Synthetic Sequence
tttcaaggtg

SEQ ID NO: 7488 - DNA, 10 bp, Artificial Sequence
  Synthetic Sequence
gcatgatccg

SEQ ID NO: 7489 - DNA, 10 bp, Artificial Sequence
  Synthetic Sequence
attatccagg

SEQ ID NO: 7490 - DNA, 10 bp, Artificial Sequence
  Synthetic Sequence
caatccgcgt

SEQ ID NO: 7491 - DNA, 10 bp, Artificial Sequence
  Synthetic Sequence
gatgtggtcg

SEQ ID NO: 7492 - DNA, 10 bp, Artificial Sequence
  Synthetic Sequence
gaagggagag

SEQ ID NO: 7493 - DNA, 10 bp, Artificial Sequence
  Synthetic Sequence
ccctacgagt

SEQ ID NO: 7494 - DNA, 10 bp, Artificial Sequence
  Synthetic Sequence
acactggctc

SEQ ID NO: 7495 - DNA, 10 bp, Artificial Sequence
  Synthetic Sequence
tacttgaaag

SEQ ID NO: 7496 - DNA, 10 bp, Artificial Sequence
  Synthetic Sequence
ataattgttt

SEQ ID NO: 7497 - DNA, 10 bp, Artificial Sequence
  Synthetic Sequence
tccgttgact

SEQ ID NO: 7498 - DNA, 10 bp, Artificial Sequence
  Synthetic Sequence
attcaacact

SEQ ID NO: 7499 - DNA, 10 bp, Artificial Sequence
  Synthetic Sequence
agactgaacc

SEQ ID NO: 7500 - DNA, 10 bp, Artificial Sequence
  Synthetic Sequence
gcggaattta

SEQ ID NO: 7501 - DNA, 10 bp, Artificial Sequence
  Synthetic Sequence
acgtacagag

SEQ ID NO: 7502 - DNA, 10 bp, Artificial Sequence
  Synthetic Sequence
gtgactcgtt

SEQ ID NO: 7503 - DNA, 10 bp, Artificial Sequence
  Synthetic Sequence
gcacagacag

SEQ ID NO: 7504 - DNA, 10 bp, Artificial Sequence
  Synthetic Sequence
ttgcgcaggc

SEQ ID NO: 7505 - DNA, 10 bp, Artificial Sequence
  Synthetic Sequence
acttaccgcg

SEQ ID NO: 7506 - DNA, 10 bp, Artificial Sequence
  Synthetic Sequence
cctctccaca

SEQ ID NO: 7507 - DNA, 10 bp, Artificial Sequence
  Synthetic Sequence
ttccagagag

SEQ ID NO: 7508 - DNA, 10 bp, Artificial Sequence
  Synthetic Sequence
cttccacaag

SEQ ID NO: 7509 - DNA, 10 bp, Artificial Sequence
  Synthetic Sequence
tttctcacaa

SEQ ID NO: 7510 - DNA, 10 bp, Artificial Sequence
  Synthetic Sequence
aaagggagct

SEQ ID NO: 7511 - DNA, 10 bp, Artificial Sequence
  Synthetic Sequence
gcggccatta

SEQ ID NO: 7512 - DNA, 10 bp, Artificial Sequence
  Synthetic Sequence
acgaactccg

SEQ ID NO: 7513 - DNA, 10 bp, Artificial Sequence
  Synthetic Sequence
gactatccca

SEQ ID NO: 7514 - DNA, 10 bp, Artificial Sequence
  Synthetic Sequence
tgcttcgatc

SEQ ID NO: 7515 - DNA, 10 bp, Artificial Sequence
  Synthetic Sequence
cagcgatcac

SEQ ID NO: 7516 - DNA, 10 bp, Artificial Sequence
  Synthetic Sequence
tccttgccgt

SEQ ID NO: 7517 - DNA, 10 bp, Artificial Sequence
  Synthetic Sequence
tgccgggcaa

SEQ ID NO: 7518 - DNA, 10 bp, Artificial Sequence
  Synthetic Sequence
ggaaactgac

SEQ ID NO: 7519 - DNA, 10 bp, Artificial Sequence
  Synthetic Sequence
cgcctacctt

SEQ ID NO: 7520 - DNA, 10 bp, Artificial Sequence
  Synthetic Sequence
tatggtcgca

SEQ ID NO: 7521 - DNA, 10 bp, Artificial Sequence
  Synthetic Sequence
cgaataatag

SEQ ID NO: 7522 - DNA, 10 bp, Artificial Sequence
  Synthetic Sequence
caggcatctg

SEQ ID NO: 7523 - DNA, 10 bp, Artificial Sequence
  Synthetic Sequence
gatgaaggtg

SEQ ID NO: 7524 - DNA, 10 bp, Artificial Sequence
  Synthetic Sequence
gagtgtttcg

SEQ ID NO: 7525 - DNA, 10 bp, Artificial Sequence
  Synthetic Sequence
gtcacagccc

SEQ ID NO: 7526 - DNA, 10 bp, Artificial Sequence
  Synthetic Sequence
cggtctccga

SEQ ID NO: 7527 - DNA, 10 bp, Artificial Sequence
  Synthetic Sequence
tgtcagccga

SEQ ID NO: 7528 - DNA, 10 bp, Artificial Sequence
  Synthetic Sequence
cacctctaac

SEQ ID NO: 7529 - DNA, 10 bp, Artificial Sequence
  Synthetic Sequence
cacaaagctc

SEQ ID NO: 7530 - DNA, 10 bp, Artificial Sequence
  Synthetic Sequence
caatcttacc

SEQ ID NO: 7531 - DNA, 10 bp, Artificial Sequence
  Synthetic Sequence
tccctattac

SEQ ID NO: 7532 - DNA, 10 bp, Artificial Sequence
  Synthetic Sequence
acgttgatgc

SEQ ID NO: 7533 - DNA, 10 bp, Artificial Sequence
  Synthetic Sequence
gccaaggcga

SEQ ID NO: 7534 - DNA, 10 bp, Artificial Sequence
  Synthetic Sequence
gaatgcactt

SEQ ID NO: 7535 - DNA, 10 bp, Artificial Sequence
  Synthetic Sequence
gtgccgacac

SEQ ID NO: 7536 - DNA, 10 bp, Artificial Sequence
  Synthetic Sequence
taacagcata

SEQ ID NO: 7537 - DNA, 10 bp, Artificial Sequence
  Synthetic Sequence
atatcatcag

SEQ ID NO: 7538 - DNA, 10 bp, Artificial Sequence
  Synthetic Sequence
tattagcgtg

SEQ ID NO: 7539 - DNA, 10 bp, Artificial Sequence
  Synthetic Sequence
cggctgctga

SEQ ID NO: 7540 - DNA, 10 bp, Artificial Sequence
  Synthetic Sequence
ctctgaagcg

SEQ ID NO: 7541 - DNA, 10 bp, Artificial Sequence
  Synthetic Sequence
catctgagag

SEQ ID NO: 7542 - DNA, 10 bp, Artificial Sequence
  Synthetic Sequence
tcctgacctc

SEQ ID NO: 7543 - DNA, 10 bp, Artificial Sequence
  Synthetic Sequence
ttctcctgtg

SEQ ID NO: 7544 - DNA, 10 bp, Artificial Sequence
  Synthetic Sequence
cgcgtatgaa

SEQ ID NO: 7545 - DNA, 10 bp, Artificial Sequence
  Synthetic Sequence
ttaacgatat

SEQ ID NO: 7546 - DNA, 10 bp, Artificial Sequence
  Synthetic Sequence
tccgaacgat

SEQ ID NO: 7547 - DNA, 10 bp, Artificial Sequence
  Synthetic Sequence
gaggtcacag

SEQ ID NO: 7548 - DNA, 10 bp, Artificial Sequence
  Synthetic Sequence
gaaagaaggc

SEQ ID NO: 7549 - DNA, 10 bp, Artificial Sequence
  Synthetic Sequence
tcagcgtgaa

SEQ ID NO: 7550 - DNA, 10 bp, Artificial Sequence
  Synthetic Sequence
ggcgcttgga

SEQ ID NO: 7551 - DNA, 10 bp, Artificial Sequence
  Synthetic Sequence
gttataaggg

SEQ ID NO: 7552 - DNA, 10 bp, Artificial Sequence
  Synthetic Sequence
gtgatcttgc

SEQ ID NO: 7553 - DNA, 10 bp, Artificial Sequence
  Synthetic Sequence
aaacgagcta

SEQ ID NO: 7554 - DNA, 10 bp, Artificial Sequence
  Synthetic Sequence
gtcgattagc

SEQ ID NO: 7555 - DNA, 10 bp, Artificial Sequence
  Synthetic Sequence
ttaacaagca

SEQ ID NO: 7556 - DNA, 10 bp, Artificial Sequence
  Synthetic Sequence
caacttagat

SEQ ID NO: 7557 - DNA, 10 bp, Artificial Sequence
  Synthetic Sequence
tcacaaacaa

SEQ ID NO: 7558 - DNA, 10 bp, Artificial Sequence
  Synthetic Sequence
gtaacttata

SEQ ID NO: 7559 - DNA, 10 bp, Artificial Sequence
  Synthetic Sequence
ggttaacggg

SEQ ID NO: 7560 - DNA, 10 bp, Artificial Sequence
  Synthetic Sequence
gtccactaat

SEQ ID NO: 7561 - DNA, 10 bp, Artificial Sequence
  Synthetic Sequence
ctgaaagaga

SEQ ID NO: 7562 - DNA, 10 bp, Artificial Sequence
  Synthetic Sequence
caactgggcg

SEQ ID NO: 7563 - DNA, 10 bp, Artificial Sequence
  Synthetic Sequence
gataatttct

SEQ ID NO: 7564 - DNA, 10 bp, Artificial Sequence
  Synthetic Sequence
taaccgtgtt

SEQ ID NO: 7565 - DNA, 10 bp, Artificial Sequence
  Synthetic Sequence
atcgctaatc

SEQ ID NO: 7566 - DNA, 10 bp, Artificial Sequence
  Synthetic Sequence
ggactgcatg

SEQ ID NO: 7567 - DNA, 10 bp, Artificial Sequence
  Synthetic Sequence
acaaggtcct

SEQ ID NO: 7568 - DNA, 10 bp, Artificial Sequence
  Synthetic Sequence
accgattgtt

SEQ ID NO: 7569 - DNA, 10 bp, Artificial Sequence
  Synthetic Sequence
atgtacgaag

SEQ ID NO: 7570 - DNA, 10 bp, Artificial Sequence
  Synthetic Sequence
gttatctgaa

SEQ ID NO: 7571 - DNA, 10 bp, Artificial Sequence
  Synthetic Sequence
cccgtgcttg

SEQ ID NO: 7572 - DNA, 10 bp, Artificial Sequence
  Synthetic Sequence
agtcgaaatc

SEQ ID NO: 7573 - DNA, 10 bp, Artificial Sequence
  Synthetic Sequence
ttatactgct

SEQ ID NO: 7574 - DNA, 10 bp, Artificial Sequence
  Synthetic Sequence
gagtcacaga

SEQ ID NO: 7575 - DNA, 10 bp, Artificial Sequence
  Synthetic Sequence
ttgaccgtat

SEQ ID NO: 7576 - DNA, 10 bp, Artificial Sequence
  Synthetic Sequence
cacgcaaact

SEQ ID NO: 7577 - DNA, 10 bp, Artificial Sequence
  Synthetic Sequence
gagcgcttca

SEQ ID NO: 7578 - DNA, 10 bp, Artificial Sequence
  Synthetic Sequence
aatgccttaa

SEQ ID NO: 7579 - DNA, 10 bp, Artificial Sequence
  Synthetic Sequence
ctaggaccct

SEQ ID NO: 7580 - DNA, 10 bp, Artificial Sequence
  Synthetic Sequence
tttctccagc

SEQ ID NO: 7581 - DNA, 10 bp, Artificial Sequence
  Synthetic Sequence
actgaaatgg

SEQ ID NO: 7582 - DNA, 10 bp, Artificial Sequence
  Synthetic Sequence
ttcagaatca

SEQ ID NO: 7583 - DNA, 10 bp, Artificial Sequence
  Synthetic Sequence
accctaacag

SEQ ID NO: 7584 - DNA, 10 bp, Artificial Sequence
  Synthetic Sequence
ctggtcctct

SEQ ID NO: 7585 - DNA, 10 bp, Artificial Sequence
  Synthetic Sequence
ggttctgctg

SEQ ID NO: 7586 - DNA, 10 bp, Artificial Sequence
  Synthetic Sequence
taccgcgatc

SEQ ID NO: 7587 - DNA, 10 bp, Artificial Sequence
  Synthetic Sequence
gacaccaagc

SEQ ID NO: 7588 - DNA, 10 bp, Artificial Sequence
  Synthetic Sequence
gatttgaagg

SEQ ID NO: 7589 - DNA, 10 bp, Artificial Sequence
  Synthetic Sequence
atcgcatctg

SEQ ID NO: 7590 - DNA, 10 bp, Artificial Sequence
  Synthetic Sequence
acgcaggcag

SEQ ID NO: 7591 - DNA, 10 bp, Artificial Sequence
  Synthetic Sequence
ctgcatcctt

SEQ ID NO: 7592 - DNA, 10 bp, Artificial Sequence
  Synthetic Sequence
cagggcatcg

SEQ ID NO: 7593 - DNA, 10 bp, Artificial Sequence
  Synthetic Sequence
ctcgccagtc

SEQ ID NO: 7594 - DNA, 10 bp, Artificial Sequence
  Synthetic Sequence
agggtttgat

SEQ ID NO: 7595 - DNA, 10 bp, Artificial Sequence
  Synthetic Sequence
aagtttaaat

SEQ ID NO: 7596 - DNA, 10 bp, Artificial Sequence
  Synthetic Sequence
taagccgcac

SEQ ID NO: 7597 - DNA, 10 bp, Artificial Sequence
  Synthetic Sequence
aggttggccg

SEQ ID NO: 7598 - DNA, 10 bp, Artificial Sequence
  Synthetic Sequence
gaaacatgta

SEQ ID NO: 7599 - DNA, 10 bp, Artificial Sequence
  Synthetic Sequence
agtgactgga

SEQ ID NO: 7600 - DNA, 10 bp, Artificial Sequence
  Synthetic Sequence
tcggcccata

SEQ ID NO: 7601 - DNA, 10 bp, Artificial Sequence
  Synthetic Sequence
agctctcata

SEQ ID NO: 7602 - DNA, 10 bp, Artificial Sequence
  Synthetic Sequence
aggactcgat

SEQ ID NO: 7603 - DNA, 10 bp, Artificial Sequence
  Synthetic Sequence
ccgtagacac

SEQ ID NO: 7604 - DNA, 10 bp, Artificial Sequence
  Synthetic Sequence
gggcaactaa

SEQ ID NO: 7605 - DNA, 10 bp, Artificial Sequence
  Synthetic Sequence
gctgttatcc

SEQ ID NO: 7606 - DNA, 10 bp, Artificial Sequence
  Synthetic Sequence
cgtaggctcc

SEQ ID NO: 7607 - DNA, 10 bp, Artificial Sequence
  Synthetic Sequence
gaagaccact

SEQ ID NO: 7608 - DNA, 10 bp, Artificial Sequence
  Synthetic Sequence
cgattagcaa

SEQ ID NO: 7609 - DNA, 10 bp, Artificial Sequence
  Synthetic Sequence
gtacctcccg

SEQ ID NO: 7610 - DNA, 10 bp, Artificial Sequence
  Synthetic Sequence
caatcactgg

SEQ ID NO: 7611 - DNA, 10 bp, Artificial Sequence
  Synthetic Sequence
ttacgatgaa

SEQ ID NO: 7612 - DNA, 10 bp, Artificial Sequence
  Synthetic Sequence
acgcggttta

SEQ ID NO: 7613 - DNA, 10 bp, Artificial Sequence
  Synthetic Sequence
cgactccaat

SEQ ID NO: 7614 - DNA, 10 bp, Artificial Sequence
  Synthetic Sequence
aacaaagtgt

SEQ ID NO: 7615 - DNA, 10 bp, Artificial Sequence
  Synthetic Sequence
acaacggtac

SEQ ID NO: 7616 - DNA, 10 bp, Artificial Sequence
  Synthetic Sequence
acaactgtca

SEQ ID NO: 7617 - DNA, 10 bp, Artificial Sequence
  Synthetic Sequence
gtttggtcgc

SEQ ID NO: 7618 - DNA, 10 bp, Artificial Sequence
  Synthetic Sequence
gaagtctaac

SEQ ID NO: 7619 - DNA, 10 bp, Artificial Sequence
  Synthetic Sequence
aggccgcttc

SEQ ID NO: 7620 - DNA, 10 bp, Artificial Sequence
  Synthetic Sequence
ccgcacgaac

SEQ ID NO: 7621 - DNA, 10 bp, Artificial Sequence
  Synthetic Sequence
aaacttccaa

SEQ ID NO: 7622 - DNA, 10 bp, Artificial Sequence
  Synthetic Sequence
ccgaagcaca

SEQ ID NO: 7623 - DNA, 10 bp, Artificial Sequence
  Synthetic Sequence
gccgactgag

SEQ ID NO: 7624 - DNA, 10 bp, Artificial Sequence
  Synthetic Sequence
attggccttc

SEQ ID NO: 7625 - DNA, 10 bp, Artificial Sequence
  Synthetic Sequence
tgagccttct

SEQ ID NO: 7626 - DNA, 10 bp, Artificial Sequence
  Synthetic Sequence
ccttattgcc

SEQ ID NO: 7627 - DNA, 10 bp, Artificial Sequence
  Synthetic Sequence
actggataga

SEQ ID NO: 7628 - DNA, 10 bp, Artificial Sequence
  Synthetic Sequence
atccctcact

SEQ ID NO: 7629 - DNA, 10 bp, Artificial Sequence
  Synthetic Sequence
tccactaata

SEQ ID NO: 7630 - DNA, 10 bp, Artificial Sequence
  Synthetic Sequence
ctagcagcca

SEQ ID NO: 7631 - DNA, 10 bp, Artificial Sequence
  Synthetic Sequence
attatatcta

SEQ ID NO: 7632 - DNA, 10 bp, Artificial Sequence
  Synthetic Sequence
ctcccgtatg

SEQ ID NO: 7633 - DNA, 10 bp, Artificial Sequence
  Synthetic Sequence
accgcagtgc

SEQ ID NO: 7634 - DNA, 10 bp, Artificial Sequence
  Synthetic Sequence
ataccttagt

SEQ ID NO: 7635 - DNA, 10 bp, Artificial Sequence
  Synthetic Sequence
tatgtgtaca

SEQ ID NO: 7636 - DNA, 10 bp, Artificial Sequence
  Synthetic Sequence
gacagccggt

SEQ ID NO: 7637 - DNA, 10 bp, Artificial Sequence
  Synthetic Sequence
gccgtaaacc

SEQ ID NO: 7638 - DNA, 10 bp, Artificial Sequence
  Synthetic Sequence
gggtctttga

SEQ ID NO: 7639 - DNA, 10 bp, Artificial Sequence
  Synthetic Sequence
tgcatgtctc

SEQ ID NO: 7640 - DNA, 10 bp, Artificial Sequence
  Synthetic Sequence
gcactcgtgt

SEQ ID NO: 7641 - DNA, 10 bp, Artificial Sequence
  Synthetic Sequence
cctcaagaga

SEQ ID NO: 7642 - DNA, 10 bp, Artificial Sequence
  Synthetic Sequence
accctcccat

SEQ ID NO: 7643 - DNA, 10 bp, Artificial Sequence
  Synthetic Sequence
aaacggcact

SEQ ID NO: 7644 - DNA, 10 bp, Artificial Sequence
  Synthetic Sequence
tcgcctcgag

SEQ ID NO: 7645 - DNA, 10 bp, Artificial Sequence
  Synthetic Sequence
cttgacaagg

SEQ ID NO: 7646 - DNA, 10 bp, Artificial Sequence
  Synthetic Sequence
acagatcgcg

SEQ ID NO: 7647 - DNA, 10 bp, Artificial Sequence
  Synthetic Sequence
agcggcacaa

SEQ ID NO: 7648 - DNA, 10 bp, Artificial Sequence
  Synthetic Sequence
cggatatgta

SEQ ID NO: 7649 - DNA, 10 bp, Artificial Sequence
  Synthetic Sequence
acgttccagg

SEQ ID NO: 7650 - DNA, 10 bp, Artificial Sequence
  Synthetic Sequence
agaactcggg

SEQ ID NO: 7651 - DNA, 10 bp, Artificial Sequence
  Synthetic Sequence
gattaagcgg

SEQ ID NO: 7652 - DNA, 10 bp, Artificial Sequence
  Synthetic Sequence
ggaacgcctc

SEQ ID NO: 7653 - DNA, 10 bp, Artificial Sequence
  Synthetic Sequence
atgatactct

SEQ ID NO: 7654 - DNA, 10 bp, Artificial Sequence
  Synthetic Sequence
cggtcgagct

SEQ ID NO: 7655 - DNA, 10 bp, Artificial Sequence
  Synthetic Sequence
gtcttaagac

SEQ ID NO: 7656 - DNA, 10 bp, Artificial Sequence
  Synthetic Sequence
cctatcaggc

SEQ ID NO: 7657 - DNA, 10 bp, Artificial Sequence
  Synthetic Sequence
aactgtagcg

SEQ ID NO: 7658 - DNA, 10 bp, Artificial Sequence
  Synthetic Sequence
cttgcactcc

SEQ ID NO: 7659 - DNA, 10 bp, Artificial Sequence
  Synthetic Sequence
caacgaggca

SEQ ID NO: 7660 - DNA, 10 bp, Artificial Sequence
  Synthetic Sequence
tcgtaatcgg

SEQ ID NO: 7661 - DNA, 10 bp, Artificial Sequence
  Synthetic Sequence
gcagtttctg

SEQ ID NO: 7662 - DNA, 10 bp, Artificial Sequence
  Synthetic Sequence
ggactgatgt

SEQ ID NO: 7663 - DNA, 10 bp, Artificial Sequence
  Synthetic Sequence
gttcagcccg

SEQ ID NO: 7664 - DNA, 10 bp, Artificial Sequence
  Synthetic Sequence
aaccttaaga

SEQ ID NO: 7665 - DNA, 10 bp, Artificial Sequence
  Synthetic Sequence
cattatccta

SEQ ID NO: 7666 - DNA, 10 bp, Artificial Sequence
  Synthetic Sequence
agtagctatg

SEQ ID NO: 7667 - DNA, 10 bp, Artificial Sequence
  Synthetic Sequence
taatggcgtt

SEQ ID NO: 7668 - DNA, 10 bp, Artificial Sequence
  Synthetic Sequence
atatacgcca

SEQ ID NO: 7669 - DNA, 10 bp, Artificial Sequence
  Synthetic Sequence
gttgtcgaac

SEQ ID NO: 7670 - DNA, 10 bp, Artificial Sequence
  Synthetic Sequence
acatcaggaa

SEQ ID NO: 7671 - DNA, 10 bp, Artificial Sequence
  Synthetic Sequence
agaaggactg

SEQ ID NO: 7672 - DNA, 10 bp, Artificial Sequence
  Synthetic Sequence
atatgagagg

SEQ ID NO: 7673 - DNA, 10 bp, Artificial Sequence
  Synthetic Sequence
tactcgctcg

SEQ ID NO: 7674 - DNA, 10 bp, Artificial Sequence
  Synthetic Sequence
cttcctacgt

SEQ ID NO: 7675 - DNA, 10 bp, Artificial Sequence
  Synthetic Sequence
cgctatggag

SEQ ID NO: 7676 - DNA, 10 bp, Artificial Sequence
  Synthetic Sequence
ccgcttaaat

SEQ ID NO: 7677 - DNA, 10 bp, Artificial Sequence
  Synthetic Sequence
acctctgacg

SEQ ID NO: 7678 - DNA, 10 bp, Artificial Sequence
  Synthetic Sequence
ctagaccttg

SEQ ID NO: 7679 - DNA, 10 bp, Artificial Sequence
  Synthetic Sequence
aacccgtcgt

SEQ ID NO: 7680 - DNA, 10 bp, Artificial Sequence
  Synthetic Sequence
gaactcaacc

SEQ ID NO: 7681 - DNA, 10 bp, Artificial Sequence
  Synthetic Sequence
tgtcggagta

SEQ ID NO: 7682 - DNA, 10 bp, Artificial Sequence
  Synthetic Sequence
gcggatccaa

SEQ ID NO: 7683 - DNA, 10 bp, Artificial Sequence
  Synthetic Sequence
cgcctccttc

SEQ ID NO: 7684 - DNA, 10 bp, Artificial Sequence
  Synthetic Sequence
tgtacaaagg

SEQ ID NO: 7685 - DNA, 10 bp, Artificial Sequence
  Synthetic Sequence
gtgactaccc

SEQ ID NO: 7686 - DNA, 10 bp, Artificial Sequence
  Synthetic Sequence
gaatacaccg

SEQ ID NO: 7687 - DNA, 10 bp, Artificial Sequence
  Synthetic Sequence
acaagtagca

SEQ ID NO: 7688 - DNA, 10 bp, Artificial Sequence
  Synthetic Sequence
cacagttgac

SEQ ID NO: 7689 - DNA, 10 bp, Artificial Sequence
  Synthetic Sequence
acgcccgaat

SEQ ID NO: 7690 - DNA, 10 bp, Artificial Sequence
  Synthetic Sequence
gacgtaggcg

SEQ ID NO: 7691 - DNA, 10 bp, Artificial Sequence
  Synthetic Sequence
gcctttgaag

SEQ ID NO: 7692 - DNA, 10 bp, Artificial Sequence
  Synthetic Sequence
ggtaacctac

SEQ ID NO: 7693 - DNA, 10 bp, Artificial Sequence
  Synthetic Sequence
cgcaaactgt

SEQ ID NO: 7694 - DNA, 10 bp, Artificial Sequence
  Synthetic Sequence
tgatgccgcg

SEQ ID NO: 7695 - DNA, 10 bp, Artificial Sequence
  Synthetic Sequence
tcgactaacg

SEQ ID NO: 7696 - DNA, 10 bp, Artificial Sequence
  Synthetic Sequence
cgataacttg

SEQ ID NO: 7697 - DNA, 10 bp, Artificial Sequence
  Synthetic Sequence
ccggagcgaa

SEQ ID NO: 7698 - DNA, 10 bp, Artificial Sequence
  Synthetic Sequence
tgtcagatat

SEQ ID NO: 7699 - DNA, 10 bp, Artificial Sequence
  Synthetic Sequence
ttggactata

SEQ ID NO: 7700 - DNA, 10 bp, Artificial Sequence
  Synthetic Sequence
cgctcgtagt

SEQ ID NO: 7701 - DNA, 10 bp, Artificial Sequence
  Synthetic Sequence
ttgcggcaac

SEQ ID NO: 7702 - DNA, 10 bp, Artificial Sequence
  Synthetic Sequence
gtctgcttca

SEQ ID NO: 7703 - DNA, 10 bp, Artificial Sequence
  Synthetic Sequence
tgcgcctaag

SEQ ID NO: 7704 - DNA, 10 bp, Artificial Sequence
  Synthetic Sequence
tagcaaggtc

SEQ ID NO: 7705 - DNA, 10 bp, Artificial Sequence
  Synthetic Sequence
agcattcatg

SEQ ID NO: 7706 - DNA, 10 bp, Artificial Sequence
  Synthetic Sequence
ttggtttggt

SEQ ID NO: 7707 - DNA, 10 bp, Artificial Sequence
  Synthetic Sequence
ttcccggctc

SEQ ID NO: 7708 - DNA, 10 bp, Artificial Sequence
  Synthetic Sequence
cagaaatatg

SEQ ID NO: 7709 - DNA, 10 bp, Artificial Sequence
  Synthetic Sequence
ttacacgctt

SEQ ID NO: 7710 - DNA, 10 bp, Artificial Sequence
  Synthetic Sequence
ggcatctata

SEQ ID NO: 7711 - DNA, 10 bp, Artificial Sequence
  Synthetic Sequence
tgatactaag

SEQ ID NO: 7712 - DNA, 10 bp, Artificial Sequence
  Synthetic Sequence
atcggatcgt

SEQ ID NO: 7713 - DNA, 10 bp, Artificial Sequence
  Synthetic Sequence
ccgtagcagc

SEQ ID NO: 7714 - DNA, 10 bp, Artificial Sequence
  Synthetic Sequence
aaacatccgg

SEQ ID NO: 7715 - DNA, 10 bp, Artificial Sequence
  Synthetic Sequence
gattgaagta

SEQ ID NO: 7716 - DNA, 10 bp, Artificial Sequence
  Synthetic Sequence
atgggatgac

SEQ ID NO: 7717 - DNA, 10 bp, Artificial Sequence
  Synthetic Sequence
ctgtaggccg

SEQ ID NO: 7718 - DNA, 10 bp, Artificial Sequence
  Synthetic Sequence
acgacacgtt

SEQ ID NO: 7719 - DNA, 10 bp, Artificial Sequence
  Synthetic Sequence
ccaagtacat

SEQ ID NO: 7720 - DNA, 10 bp, Artificial Sequence
  Synthetic Sequence
cgcatagtaa

SEQ ID NO: 7721 - DNA, 10 bp, Artificial Sequence
  Synthetic Sequence
acgaaatagt

SEQ ID NO: 7722 - DNA, 10 bp, Artificial Sequence
  Synthetic Sequence
gcaacctagg

SEQ ID NO: 7723 - DNA, 10 bp, Artificial Sequence
  Synthetic Sequence
gacctttatt

SEQ ID NO: 7724 - DNA, 10 bp, Artificial Sequence
  Synthetic Sequence
gagcggcata

SEQ ID NO: 7725 - DNA, 10 bp, Artificial Sequence
  Synthetic Sequence
ggatttagag

SEQ ID NO: 7726 - DNA, 10 bp, Artificial Sequence
  Synthetic Sequence
tttccggaac

SEQ ID NO: 7727 - DNA, 10 bp, Artificial Sequence
  Synthetic Sequence
gtcataatcc

SEQ ID NO: 7728 - DNA, 10 bp, Artificial Sequence
  Synthetic Sequence
ggtgcagtat

SEQ ID NO: 7729 - DNA, 10 bp, Artificial Sequence
  Synthetic Sequence
ttggctcagt

SEQ ID NO: 7730 - DNA, 10 bp, Artificial Sequence
  Synthetic Sequence
atatatcgta

SEQ ID NO: 7731 - DNA, 10 bp, Artificial Sequence
  Synthetic Sequence
gaagccctcg

SEQ ID NO: 7732 - DNA, 10 bp, Artificial Sequence
  Synthetic Sequence
cacagggacc

SEQ ID NO: 7733 - DNA, 10 bp, Artificial Sequence
  Synthetic Sequence
aagttatctt

SEQ ID NO: 7734 - DNA, 10 bp, Artificial Sequence
  Synthetic Sequence
ctccacactg

SEQ ID NO: 7735 - DNA, 10 bp, Artificial Sequence
  Synthetic Sequence
cgggcgagaa

SEQ ID NO: 7736 - DNA, 10 bp, Artificial Sequence
  Synthetic Sequence
gcaaatgagt

SEQ ID NO: 7737 - DNA, 10 bp, Artificial Sequence
  Synthetic Sequence
cgcatgcaca

SEQ ID NO: 7738 - DNA, 10 bp, Artificial Sequence
  Synthetic Sequence
tatacggcta

SEQ ID NO: 7739 - DNA, 10 bp, Artificial Sequence
  Synthetic Sequence
aatgaacatc

SEQ ID NO: 7740 - DNA, 10 bp, Artificial Sequence
  Synthetic Sequence
gtgattgtcc

SEQ ID NO: 7741 - DNA, 10 bp, Artificial Sequence
  Synthetic Sequence
cctcctccga

SEQ ID NO: 7742 - DNA, 10 bp, Artificial Sequence
  Synthetic Sequence
gtgtggtttc

SEQ ID NO: 7743 - DNA, 10 bp, Artificial Sequence
  Synthetic Sequence
acatcattcg

SEQ ID NO: 7744 - DNA, 10 bp, Artificial Sequence
  Synthetic Sequence
tttgcccagg

SEQ ID NO: 7745 - DNA, 10 bp, Artificial Sequence
  Synthetic Sequence
aagtaatacc

SEQ ID NO: 7746 - DNA, 10 bp, Artificial Sequence
  Synthetic Sequence
gggcaggtca

SEQ ID NO: 7747 - DNA, 10 bp, Artificial Sequence
  Synthetic Sequence
ttctaccacg

SEQ ID NO: 7748 - DNA, 10 bp, Artificial Sequence
  Synthetic Sequence
cgcatatttg

SEQ ID NO: 7749 - DNA, 10 bp, Artificial Sequence
  Synthetic Sequence
agaagggagt

SEQ ID NO: 7750 - DNA, 10 bp, Artificial Sequence
  Synthetic Sequence
aatcctcagt

SEQ ID NO: 7751 - DNA, 10 bp, Artificial Sequence
  Synthetic Sequence
gccctttcat

SEQ ID NO: 7752 - DNA, 10 bp, Artificial Sequence
  Synthetic Sequence
aaccaatgcg

SEQ ID NO: 7753 - DNA, 10 bp, Artificial Sequence
  Synthetic Sequence
acgcgtacgc

SEQ ID NO: 7754 - DNA, 10 bp, Artificial Sequence
  Synthetic Sequence
cctgttgctt

SEQ ID NO: 7755 - DNA, 10 bp, Artificial Sequence
  Synthetic Sequence
ttggctacat

SEQ ID NO: 7756 - DNA, 10 bp, Artificial Sequence
  Synthetic Sequence
ttaagatcac

SEQ ID NO: 7757 - DNA, 10 bp, Artificial Sequence
  Synthetic Sequence
cagagccagt

SEQ ID NO: 7758 - DNA, 10 bp, Artificial Sequence
  Synthetic Sequence
tgctcccaat

SEQ ID NO: 7759 - DNA, 10 bp, Artificial Sequence
  Synthetic Sequence
tcacgataac

SEQ ID NO: 7760 - DNA, 10 bp, Artificial Sequence
  Synthetic Sequence
gggaactaag

SEQ ID NO: 7761 - DNA, 10 bp, Artificial Sequence
  Synthetic Sequence
cattgggagg

SEQ ID NO: 7762 - DNA, 10 bp, Artificial Sequence
  Synthetic Sequence
tcactaggaa

SEQ ID NO: 7763 - DNA, 10 bp, Artificial Sequence
  Synthetic Sequence
agcctgggta

SEQ ID NO: 7764 - DNA, 10 bp, Artificial Sequence
  Synthetic Sequence
tgtgccgtgc

SEQ ID NO: 7765 - DNA, 10 bp, Artificial Sequence
  Synthetic Sequence
cttatctaat

SEQ ID NO: 7766 - DNA, 10 bp, Artificial Sequence
  Synthetic Sequence
ctcggaccaa

SEQ ID NO: 7767 - DNA, 10 bp, Artificial Sequence
  Synthetic Sequence
ttggcatatt

SEQ ID NO: 7768 - DNA, 10 bp, Artificial Sequence
  Synthetic Sequence
gcgaagagca

SEQ ID NO: 7769 - DNA, 10 bp, Artificial Sequence
  Synthetic Sequence
tcaagactgc

SEQ ID NO: 7770 - DNA, 10 bp, Artificial Sequence
  Synthetic Sequence
aaacgccctt

SEQ ID NO: 7771 - DNA, 10 bp, Artificial Sequence
  Synthetic Sequence
ctcgaataac

SEQ ID NO: 7772 - DNA, 10 bp, Artificial Sequence
  Synthetic Sequence
cgagttctcc

SEQ ID NO: 7773 - DNA, 10 bp, Artificial Sequence
  Synthetic Sequence
gtgcgtcatg

SEQ ID NO: 7774 - DNA, 10 bp, Artificial Sequence
  Synthetic Sequence
ttgttcgata

SEQ ID NO: 7775 - DNA, 10 bp, Artificial Sequence
  Synthetic Sequence
tcccgactgt

SEQ ID NO: 7776 - DNA, 10 bp, Artificial Sequence
  Synthetic Sequence
taccatgaca

SEQ ID NO: 7777 - DNA, 10 bp, Artificial Sequence
  Synthetic Sequence
ttgtcagcgc

SEQ ID NO: 7778 - DNA, 10 bp, Artificial Sequence
  Synthetic Sequence
aatgtccact

SEQ ID NO: 7779 - DNA, 10 bp, Artificial Sequence
  Synthetic Sequence
cagattgctc

SEQ ID NO: 7780 - DNA, 10 bp, Artificial Sequence
  Synthetic Sequence
cttatatggt

SEQ ID NO: 7781 - DNA, 10 bp, Artificial Sequence
  Synthetic Sequence
catggtggct

SEQ ID NO: 7782 - DNA, 10 bp, Artificial Sequence
  Synthetic Sequence
cggtctaatg

SEQ ID NO: 7783 - DNA, 10 bp, Artificial Sequence
  Synthetic Sequence
tcgatcactt

SEQ ID NO: 7784 - DNA, 10 bp, Artificial Sequence
  Synthetic Sequence
cacatattac

SEQ ID NO: 7785 - DNA, 10 bp, Artificial Sequence
  Synthetic Sequence
ccagccgtag

SEQ ID NO: 7786 - DNA, 10 bp, Artificial Sequence
  Synthetic Sequence
gtcgacgcag

SEQ ID NO: 7787 - DNA, 10 bp, Artificial Sequence
  Synthetic Sequence
tgtgaacacc

SEQ ID NO: 7788 - DNA, 10 bp, Artificial Sequence
  Synthetic Sequence
agtgggcaca

SEQ ID NO: 7789 - DNA, 10 bp, Artificial Sequence
  Synthetic Sequence
ttattccaaa

SEQ ID NO: 7790 - DNA, 10 bp, Artificial Sequence
  Synthetic Sequence
tccctacggg

SEQ ID NO: 7791 - DNA, 10 bp, Artificial Sequence
  Synthetic Sequence
gtgcgtgcac

SEQ ID NO: 7792 - DNA, 10 bp, Artificial Sequence
  Synthetic Sequence
acggcccttg

SEQ ID NO: 7793 - DNA, 10 bp, Artificial Sequence
  Synthetic Sequence
cttaagatct

SEQ ID NO: 7794 - DNA, 10 bp, Artificial Sequence
  Synthetic Sequence
gcgggttgta

SEQ ID NO: 7795 - DNA, 10 bp, Artificial Sequence
  Synthetic Sequence
ataataatac

SEQ ID NO: 7796 - DNA, 10 bp, Artificial Sequence
  Synthetic Sequence
ggacagaaac

SEQ ID NO: 7797 - DNA, 10 bp, Artificial Sequence
  Synthetic Sequence
aattaagctc

SEQ ID NO: 7798 - DNA, 10 bp, Artificial Sequence
  Synthetic Sequence
agaccaacat

SEQ ID NO: 7799 - DNA, 10 bp, Artificial Sequence
  Synthetic Sequence
attccgcacg

SEQ ID NO: 7800 - DNA, 10 bp, Artificial Sequence
  Synthetic Sequence
tggtgctggc

SEQ ID NO: 7801 - DNA, 10 bp, Artificial Sequence
  Synthetic Sequence
aagggttcta

SEQ ID NO: 7802 - DNA, 10 bp, Artificial Sequence
  Synthetic Sequence
ctcaggacaa

SEQ ID NO: 7803 - DNA, 10 bp, Artificial Sequence
  Synthetic Sequence
gagtttggcg

SEQ ID NO: 7804 - DNA, 10 bp, Artificial Sequence
  Synthetic Sequence
aggtggacgg

SEQ ID NO: 7805 - DNA, 10 bp, Artificial Sequence
  Synthetic Sequence
ttcgataaga

SEQ ID NO: 7806 - DNA, 10 bp, Artificial Sequence
  Synthetic Sequence
gatacttcgc

SEQ ID NO: 7807 - DNA, 10 bp, Artificial Sequence
  Synthetic Sequence
gtccgcacct

SEQ ID NO: 7808 - DNA, 10 bp, Artificial Sequence
  Synthetic Sequence
gcatttcagc

SEQ ID NO: 7809 - DNA, 10 bp, Artificial Sequence
  Synthetic Sequence
gctatgttgt

SEQ ID NO: 7810 - DNA, 10 bp, Artificial Sequence
  Synthetic Sequence
ttattgcgcc

SEQ ID NO: 7811 - DNA, 10 bp, Artificial Sequence
  Synthetic Sequence
taatacattt

SEQ ID NO: 7812 - DNA, 10 bp, Artificial Sequence
  Synthetic Sequence
agacctcgct

SEQ ID NO: 7813 - DNA, 10 bp, Artificial Sequence
  Synthetic Sequence
tacttcctaa

SEQ ID NO: 7814 - DNA, 10 bp, Artificial Sequence
  Synthetic Sequence
gtgtgcctcg

SEQ ID NO: 7815 - DNA, 10 bp, Artificial Sequence
  Synthetic Sequence
cccaacggac

SEQ ID NO: 7816 - DNA, 10 bp, Artificial Sequence
  Synthetic Sequence
accaccgctg

SEQ ID NO: 7817 - DNA, 10 bp, Artificial Sequence
  Synthetic Sequence
cctaaactta

SEQ ID NO: 7818 - DNA, 10 bp, Artificial Sequence
  Synthetic Sequence
gtagcggaca

SEQ ID NO: 7819 - DNA, 10 bp, Artificial Sequence
  Synthetic Sequence
accgttatgg

SEQ ID NO: 7820 - DNA, 10 bp, Artificial Sequence
  Synthetic Sequence
actttgtact

SEQ ID NO: 7821 - DNA, 10 bp, Artificial Sequence
  Synthetic Sequence
tgggaaggta

SEQ ID NO: 7822 - DNA, 10 bp, Artificial Sequence
  Synthetic Sequence
tgatcacatt

SEQ ID NO: 7823 - DNA, 10 bp, Artificial Sequence
  Synthetic Sequence
cctcactatt

SEQ ID NO: 7824 - DNA, 10 bp, Artificial Sequence
  Synthetic Sequence
tgcagtttaa

SEQ ID NO: 7825 - DNA, 10 bp, Artificial Sequence
  Synthetic Sequence
gtggtcagat

SEQ ID NO: 7826 - DNA, 10 bp, Artificial Sequence
  Synthetic Sequence
gagtgcagcg

SEQ ID NO: 7827 - DNA, 10 bp, Artificial Sequence
  Synthetic Sequence
cctagtaacg

SEQ ID NO: 7828 - DNA, 10 bp, Artificial Sequence
  Synthetic Sequence
atacggagga

SEQ ID NO: 7829 - DNA, 10 bp, Artificial Sequence
  Synthetic Sequence
gctggcgtga

SEQ ID NO: 7830 - DNA, 10 bp, Artificial Sequence
  Synthetic Sequence
tttgcacggt

SEQ ID NO: 7831 - DNA, 10 bp, Artificial Sequence
  Synthetic Sequence
gtctcacgcg

SEQ ID NO: 7832 - DNA, 10 bp, Artificial Sequence
  Synthetic Sequence
acggcattct

SEQ ID NO: 7833 - DNA, 10 bp, Artificial Sequence
  Synthetic Sequence
cacgctaggg

SEQ ID NO: 7834 - DNA, 10 bp, Artificial Sequence
  Synthetic Sequence
ggattgtttg

SEQ ID NO: 7835 - DNA, 10 bp, Artificial Sequence
  Synthetic Sequence
tctaggtccg

SEQ ID NO: 7836 - DNA, 10 bp, Artificial Sequence
  Synthetic Sequence
ttgcgttctt

SEQ ID NO: 7837 - DNA, 10 bp, Artificial Sequence
  Synthetic Sequence
gacgtctaga

SEQ ID NO: 7838 - DNA, 10 bp, Artificial Sequence
  Synthetic Sequence
ggtatgttta

SEQ ID NO: 7839 - DNA, 10 bp, Artificial Sequence
  Synthetic Sequence
aacgtttaac

SEQ ID NO: 7840 - DNA, 10 bp, Artificial Sequence
  Synthetic Sequence
taccacccta

SEQ ID NO: 7841 - DNA, 10 bp, Artificial Sequence
  Synthetic Sequence
cagtaaactt

SEQ ID NO: 7842 - DNA, 10 bp, Artificial Sequence
  Synthetic Sequence
tagccatcga

SEQ ID NO: 7843 - DNA, 10 bp, Artificial Sequence
  Synthetic Sequence
aacctgtaaa

SEQ ID NO: 7844 - DNA, 10 bp, Artificial Sequence
  Synthetic Sequence
gcgccctttg

SEQ ID NO: 7845 - DNA, 10 bp, Artificial Sequence
  Synthetic Sequence
gctttgttag

SEQ ID NO: 7846 - DNA, 10 bp, Artificial Sequence
  Synthetic Sequence
tgttggccgc

SEQ ID NO: 7847 - DNA, 10 bp, Artificial Sequence
  Synthetic Sequence
tttgtggtgg

SEQ ID NO: 7848 - DNA, 10 bp, Artificial Sequence
  Synthetic Sequence
agtcctcgga

SEQ ID NO: 7849 - DNA, 10 bp, Artificial Sequence
  Synthetic Sequence
taaactacgg

SEQ ID NO: 7850 - DNA, 10 bp, Artificial Sequence
  Synthetic Sequence
catggatcaa

SEQ ID NO: 7851 - DNA, 10 bp, Artificial Sequence
  Synthetic Sequence
tgtagattta

SEQ ID NO: 7852 - DNA, 10 bp, Artificial Sequence
  Synthetic Sequence
gaatattagc

SEQ ID NO: 7853 - DNA, 10 bp, Artificial Sequence
  Synthetic Sequence
tctacctccc

SEQ ID NO: 7854 - DNA, 10 bp, Artificial Sequence
  Synthetic Sequence
tatctcgttc

SEQ ID NO: 7855 - DNA, 10 bp, Artificial Sequence
  Synthetic Sequence
accgtaattc

SEQ ID NO: 7856 - DNA, 10 bp, Artificial Sequence
  Synthetic Sequence
gccgtggtac

SEQ ID NO: 7857 - DNA, 10 bp, Artificial Sequence
  Synthetic Sequence
ctacatatag

SEQ ID NO: 7858 - DNA, 10 bp, Artificial Sequence
  Synthetic Sequence
gggagtaagg

SEQ ID NO: 7859 - DNA, 10 bp, Artificial Sequence
  Synthetic Sequence
cacgagctga

SEQ ID NO: 7860 - DNA, 10 bp, Artificial Sequence
  Synthetic Sequence
tagtgtgggc

SEQ ID NO: 7861 - DNA, 10 bp, Artificial Sequence
  Synthetic Sequence
ttccgggacc

SEQ ID NO: 7862 - DNA, 10 bp, Artificial Sequence
  Synthetic Sequence
caatgaacct

SEQ ID NO: 7863 - DNA, 10 bp, Artificial Sequence
  Synthetic Sequence
ttgagcaatt

SEQ ID NO: 7864 - DNA, 10 bp, Artificial Sequence
  Synthetic Sequence
cgagtcgaac

SEQ ID NO: 7865 - DNA, 10 bp, Artificial Sequence
  Synthetic Sequence
gttgcgatgt

SEQ ID NO: 7866 - DNA, 10 bp, Artificial Sequence
  Synthetic Sequence
catgtattga

SEQ ID NO: 7867 - DNA, 10 bp, Artificial Sequence
  Synthetic Sequence
gctatacgac

SEQ ID NO: 7868 - DNA, 10 bp, Artificial Sequence
  Synthetic Sequence
ctacccagac

SEQ ID NO: 7869 - DNA, 10 bp, Artificial Sequence
  Synthetic Sequence
ttggtactcg

SEQ ID NO: 7870 - DNA, 10 bp, Artificial Sequence
  Synthetic Sequence
atgtcgggct

SEQ ID NO: 7871 - DNA, 10 bp, Artificial Sequence
  Synthetic Sequence
ggtttcgcac

SEQ ID NO: 7872 - DNA, 10 bp, Artificial Sequence
  Synthetic Sequence
cgtggccgaa

SEQ ID NO: 7873 - DNA, 10 bp, Artificial Sequence
  Synthetic Sequence
aaccgccgga

SEQ ID NO: 7874 - DNA, 10 bp, Artificial Sequence
  Synthetic Sequence
gacgtacgta

SEQ ID NO: 7875 - DNA, 10 bp, Artificial Sequence
  Synthetic Sequence
tataaatgcc

SEQ ID NO: 7876 - DNA, 10 bp, Artificial Sequence
  Synthetic Sequence
acgtaggcca

SEQ ID NO: 7877 - DNA, 10 bp, Artificial Sequence
  Synthetic Sequence
gcggtaattt

SEQ ID NO: 7878 - DNA, 10 bp, Artificial Sequence
  Synthetic Sequence
tttccagagg

SEQ ID NO: 7879 - DNA, 10 bp, Artificial Sequence
  Synthetic Sequence
acacgggtgg

SEQ ID NO: 7880 - DNA, 10 bp, Artificial Sequence
  Synthetic Sequence
caccagctcc

SEQ ID NO: 7881 - DNA, 10 bp, Artificial Sequence
  Synthetic Sequence
cgcacgaggt

SEQ ID NO: 7882 - DNA, 10 bp, Artificial Sequence
  Synthetic Sequence
agtctgacac

SEQ ID NO: 7883 - DNA, 10 bp, Artificial Sequence
  Synthetic Sequence
ttcctcgtgc

SEQ ID NO: 7884 - DNA, 10 bp, Artificial Sequence
  Synthetic Sequence
ggtaacgtcg

SEQ ID NO: 7885 - DNA, 10 bp, Artificial Sequence
  Synthetic Sequence
gacttaagtt

SEQ ID NO: 7886 - DNA, 10 bp, Artificial Sequence
  Synthetic Sequence
cataaatgaa

SEQ ID NO: 7887 - DNA, 10 bp, Artificial Sequence
  Synthetic Sequence
cttaacagtt

SEQ ID NO: 7888 - DNA, 10 bp, Artificial Sequence
  Synthetic Sequence
accttccaaa

SEQ ID NO: 7889 - DNA, 10 bp, Artificial Sequence
  Synthetic Sequence
ctacaaccgc

SEQ ID NO: 7890 - DNA, 10 bp, Artificial Sequence
  Synthetic Sequence
ccggtctcaa

SEQ ID NO: 7891 - DNA, 10 bp, Artificial Sequence
  Synthetic Sequence
tcacacgatc

SEQ ID NO: 7892 - DNA, 10 bp, Artificial Sequence
  Synthetic Sequence
actgtggccc

SEQ ID NO: 7893 - DNA, 10 bp, Artificial Sequence
  Synthetic Sequence
atcatgaagg

SEQ ID NO: 7894 - DNA, 10 bp, Artificial Sequence
  Synthetic Sequence
caaatacgtg

SEQ ID NO: 7895 - DNA, 10 bp, Artificial Sequence
  Synthetic Sequence
gcagtatcgc

SEQ ID NO: 7896 - DNA, 10 bp, Artificial Sequence
  Synthetic Sequence
ctagagcgag

SEQ ID NO: 7897 - DNA, 10 bp, Artificial Sequence
  Synthetic Sequence
ctggcattgc

SEQ ID NO: 7898 - DNA, 10 bp, Artificial Sequence
  Synthetic Sequence
agggaaagac

SEQ ID NO: 7899 - DNA, 10 bp, Artificial Sequence
  Synthetic Sequence
agcagacgcg

SEQ ID NO: 7900 - DNA, 10 bp, Artificial Sequence
  Synthetic Sequence
gactttaccc

SEQ ID NO: 7901 - DNA, 10 bp, Artificial Sequence
  Synthetic Sequence
tttgttagcg

SEQ ID NO: 7902 - DNA, 10 bp, Artificial Sequence
  Synthetic Sequence
aaacctgact

SEQ ID NO: 7903 - DNA, 10 bp, Artificial Sequence
  Synthetic Sequence
ctcataactt

SEQ ID NO: 7904 - DNA, 10 bp, Artificial Sequence
  Synthetic Sequence
aaggtaacaa

SEQ ID NO: 7905 - DNA, 10 bp, Artificial Sequence
  Synthetic Sequence
ctacgaccag

SEQ ID NO: 7906 - DNA, 10 bp, Artificial Sequence
  Synthetic Sequence
taagtgaacc

SEQ ID NO: 7907 - DNA, 10 bp, Artificial Sequence
  Synthetic Sequence
ccagtcgggt

SEQ ID NO: 7908 - DNA, 10 bp, Artificial Sequence
  Synthetic Sequence
tgttattggc

SEQ ID NO: 7909 - DNA, 10 bp, Artificial Sequence
  Synthetic Sequence
tgttcatgct

SEQ ID NO: 7910 - DNA, 10 bp, Artificial Sequence
  Synthetic Sequence
attctttagc

SEQ ID NO: 7911 - DNA, 10 bp, Artificial Sequence
  Synthetic Sequence
accttgcttc

SEQ ID NO: 7912 - DNA, 10 bp, Artificial Sequence
  Synthetic Sequence
aataatcctg

SEQ ID NO: 7913 - DNA, 10 bp, Artificial Sequence
  Synthetic Sequence
gcagcaaccg

SEQ ID NO: 7914 - DNA, 10 bp, Artificial Sequence
  Synthetic Sequence
attcttgacg

SEQ ID NO: 7915 - DNA, 10 bp, Artificial Sequence
  Synthetic Sequence
agggtaccat

SEQ ID NO: 7916 - DNA, 10 bp, Artificial Sequence
  Synthetic Sequence
gactgacagg

SEQ ID NO: 7917 - DNA, 10 bp, Artificial Sequence
  Synthetic Sequence
actacctaac

SEQ ID NO: 7918 - DNA, 10 bp, Artificial Sequence
  Synthetic Sequence
gctagtgctt

SEQ ID NO: 7919 - DNA, 10 bp, Artificial Sequence
  Synthetic Sequence
tcatgaagtc

SEQ ID NO: 7920 - DNA, 10 bp, Artificial Sequence
  Synthetic Sequence
acgggaaacc

SEQ ID NO: 7921 - DNA, 10 bp, Artificial Sequence
  Synthetic Sequence
acaacgacat

SEQ ID NO: 7922 - DNA, 10 bp, Artificial Sequence
  Synthetic Sequence
agaagctgct

SEQ ID NO: 7923 - DNA, 10 bp, Artificial Sequence
  Synthetic Sequence
ctccttacgg

SEQ ID NO: 7924 - DNA, 10 bp, Artificial Sequence
  Synthetic Sequence
acccggtgtg

SEQ ID NO: 7925 - DNA, 10 bp, Artificial Sequence
  Synthetic Sequence
gtcgccacga

SEQ ID NO: 7926 - DNA, 10 bp, Artificial Sequence
  Synthetic Sequence
atgtctctcc

SEQ ID NO: 7927 - DNA, 10 bp, Artificial Sequence
  Synthetic Sequence
cttgggcagg

SEQ ID NO: 7928 - DNA, 10 bp, Artificial Sequence
  Synthetic Sequence
attcggattt

SEQ ID NO: 7929 - DNA, 10 bp, Artificial Sequence
  Synthetic Sequence
gctcgtaaga

SEQ ID NO: 7930 - DNA, 10 bp, Artificial Sequence
  Synthetic Sequence
ctaagtgggc

SEQ ID NO: 7931 - DNA, 10 bp, Artificial Sequence
  Synthetic Sequence
taaaccaatt

SEQ ID NO: 7932 - DNA, 10 bp, Artificial Sequence
  Synthetic Sequence
acatataagg

SEQ ID NO: 7933 - DNA, 10 bp, Artificial Sequence
  Synthetic Sequence
acataatgtg

SEQ ID NO: 7934 - DNA, 10 bp, Artificial Sequence
  Synthetic Sequence
gggttgtctt

SEQ ID NO: 7935 - DNA, 10 bp, Artificial Sequence
  Synthetic Sequence
agcgcagcgt

SEQ ID NO: 7936 - DNA, 10 bp, Artificial Sequence
  Synthetic Sequence
ctataacggg

SEQ ID NO: 7937 - DNA, 10 bp, Artificial Sequence
  Synthetic Sequence
gggaagaata

SEQ ID NO: 7938 - DNA, 10 bp, Artificial Sequence
  Synthetic Sequence
tttacatgtc

SEQ ID NO: 7939 - DNA, 10 bp, Artificial Sequence
  Synthetic Sequence
aagtagggat

SEQ ID NO: 7940 - DNA, 10 bp, Artificial Sequence
  Synthetic Sequence
gaaatactcc

SEQ ID NO: 7941 - DNA, 10 bp, Artificial Sequence
  Synthetic Sequence
cgtacagcat

SEQ ID NO: 7942 - DNA, 10 bp, Artificial Sequence
  Synthetic Sequence
ttaccatcct

SEQ ID NO: 7943 - DNA, 10 bp, Artificial Sequence
  Synthetic Sequence
aataggtacc

SEQ ID NO: 7944 - DNA, 10 bp, Artificial Sequence
  Synthetic Sequence
gcgtatttcc

SEQ ID NO: 7945 - DNA, 10 bp, Artificial Sequence
  Synthetic Sequence
cgagattata

SEQ ID NO: 7946 - DNA, 10 bp, Artificial Sequence
  Synthetic Sequence
tcggatgcta

SEQ ID NO: 7947 - DNA, 10 bp, Artificial Sequence
  Synthetic Sequence
ccttgtcacc

SEQ ID NO: 7948 - DNA, 10 bp, Artificial Sequence
  Synthetic Sequence
gaggaaagcg

SEQ ID NO: 7949 - DNA, 10 bp, Artificial Sequence
  Synthetic Sequence
acgctgtagc

SEQ ID NO: 7950 - DNA, 10 bp, Artificial Sequence
  Synthetic Sequence
tgtggtcact

SEQ ID NO: 7951 - DNA, 10 bp, Artificial Sequence
  Synthetic Sequence
gcagtccttg

SEQ ID NO: 7952 - DNA, 10 bp, Artificial Sequence
  Synthetic Sequence
gcctaaatca

SEQ ID NO: 7953 - DNA, 10 bp, Artificial Sequence
  Synthetic Sequence
gtcatacgaa

SEQ ID NO: 7954 - DNA, 10 bp, Artificial Sequence
  Synthetic Sequence
cgtcctccac

SEQ ID NO: 7955 - DNA, 10 bp, Artificial Sequence
  Synthetic Sequence
gatccaatcg

SEQ ID NO: 7956 - DNA, 10 bp, Artificial Sequence
  Synthetic Sequence
gggacagctt

SEQ ID NO: 7957 - DNA, 10 bp, Artificial Sequence
  Synthetic Sequence
aagatcgcgg

SEQ ID NO: 7958 - DNA, 10 bp, Artificial Sequence
  Synthetic Sequence
gcctggcaga

SEQ ID NO: 7959 - DNA, 10 bp, Artificial Sequence
  Synthetic Sequence
cggaatggaa

SEQ ID NO: 7960 - DNA, 10 bp, Artificial Sequence
  Synthetic Sequence
tgactacgga

SEQ ID NO: 7961 - DNA, 10 bp, Artificial Sequence
  Synthetic Sequence
gttccatgcg

SEQ ID NO: 7962 - DNA, 10 bp, Artificial Sequence
  Synthetic Sequence
gtgggtaaac

SEQ ID NO: 7963 - DNA, 10 bp, Artificial Sequence
  Synthetic Sequence
gcagattcat

SEQ ID NO: 7964 - DNA, 10 bp, Artificial Sequence
  Synthetic Sequence
tagctcggaa

SEQ ID NO: 7965 - DNA, 10 bp, Artificial Sequence
  Synthetic Sequence
aaagtctggc

SEQ ID NO: 7966 - DNA, 10 bp, Artificial Sequence
  Synthetic Sequence
ataaactttc

SEQ ID NO: 7967 - DNA, 10 bp, Artificial Sequence
  Synthetic Sequence
aacgaaggca

SEQ ID NO: 7968 - DNA, 10 bp, Artificial Sequence
  Synthetic Sequence
atggctacca

SEQ ID NO: 7969 - DNA, 10 bp, Artificial Sequence
  Synthetic Sequence
accaacacag

SEQ ID NO: 7970 - DNA, 10 bp, Artificial Sequence
  Synthetic Sequence
ctctgccata

SEQ ID NO: 7971 - DNA, 10 bp, Artificial Sequence
  Synthetic Sequence
tccgagaccg

SEQ ID NO: 7972 - DNA, 10 bp, Artificial Sequence
  Synthetic Sequence
gaattcgtga

SEQ ID NO: 7973 - DNA, 10 bp, Artificial Sequence
  Synthetic Sequence
ttaaagatgc

SEQ ID NO: 7974 - DNA, 10 bp, Artificial Sequence
  Synthetic Sequence
attagaggat

SEQ ID NO: 7975 - DNA, 10 bp, Artificial Sequence
  Synthetic Sequence
cacaaatggt

SEQ ID NO: 7976 - DNA, 10 bp, Artificial Sequence
  Synthetic Sequence
tattcgtaat

SEQ ID NO: 7977 - DNA, 10 bp, Artificial Sequence
  Synthetic Sequence
tccgttagaa

SEQ ID NO: 7978 - DNA, 10 bp, Artificial Sequence
  Synthetic Sequence
gagttgataa

SEQ ID NO: 7979 - DNA, 10 bp, Artificial Sequence
  Synthetic Sequence
cagcgattta

SEQ ID NO: 7980 - DNA, 10 bp, Artificial Sequence
  Synthetic Sequence
cgtcaacgca

SEQ ID NO: 7981 - DNA, 10 bp, Artificial Sequence
  Synthetic Sequence
tgtagtactc

SEQ ID NO: 7982 - DNA, 10 bp, Artificial Sequence
  Synthetic Sequence
ttgataccag

SEQ ID NO: 7983 - DNA, 10 bp, Artificial Sequence
  Synthetic Sequence
ccacactcta

SEQ ID NO: 7984 - DNA, 10 bp, Artificial Sequence
  Synthetic Sequence
agtgataaac

SEQ ID NO: 7985 - DNA, 10 bp, Artificial Sequence
  Synthetic Sequence
ccacaccaaa

SEQ ID NO: 7986 - DNA, 10 bp, Artificial Sequence
  Synthetic Sequence
actgataatt

SEQ ID NO: 7987 - DNA, 10 bp, Artificial Sequence
  Synthetic Sequence
aagtcgcgta

SEQ ID NO: 7988 - DNA, 10 bp, Artificial Sequence
  Synthetic Sequence
cagatcggcc

SEQ ID NO: 7989 - DNA, 10 bp, Artificial Sequence
  Synthetic Sequence
aatttaatgc

SEQ ID NO: 7990 - DNA, 10 bp, Artificial Sequence
  Synthetic Sequence
tagggaactt

SEQ ID NO: 7991 - DNA, 10 bp, Artificial Sequence
  Synthetic Sequence
gcgagaactg

SEQ ID NO: 7992 - DNA, 10 bp, Artificial Sequence
  Synthetic Sequence
ctgagccttg

SEQ ID NO: 7993 - DNA, 10 bp, Artificial Sequence
  Synthetic Sequence
gggatagaag

SEQ ID NO: 7994 - DNA, 10 bp, Artificial Sequence
  Synthetic Sequence
ctgacagcaa

SEQ ID NO: 7995 - DNA, 10 bp, Artificial Sequence
  Synthetic Sequence
atcatagtat

SEQ ID NO: 7996 - DNA, 10 bp, Artificial Sequence
  Synthetic Sequence
gtcgttcctt

SEQ ID NO: 7997 - DNA, 10 bp, Artificial Sequence
  Synthetic Sequence
gacactctat

SEQ ID NO: 7998 - DNA, 10 bp, Artificial Sequence
  Synthetic Sequence
cgaaaggtgg

SEQ ID NO: 7999 - DNA, 10 bp, Artificial Sequence
  Synthetic Sequence
gtgtgtggtc

SEQ ID NO: 8000 - DNA, 10 bp, Artificial Sequence
  Synthetic Sequence
aatctagtta

SEQ ID NO: 8001 - DNA, 10 bp, Artificial Sequence
  Synthetic Sequence
tgccgtggtt

SEQ ID NO: 8002 - DNA, 10 bp, Artificial Sequence
  Synthetic Sequence
ttgtgggacg

SEQ ID NO: 8003 - DNA, 10 bp, Artificial Sequence
  Synthetic Sequence
tggttagttt

SEQ ID NO: 8004 - DNA, 10 bp, Artificial Sequence
  Synthetic Sequence
gtggctagtg

SEQ ID NO: 8005 - DNA, 10 bp, Artificial Sequence
  Synthetic Sequence
cgtattagta

SEQ ID NO: 8006 - DNA, 10 bp, Artificial Sequence
  Synthetic Sequence
ggtgtttctt

SEQ ID NO: 8007 - DNA, 10 bp, Artificial Sequence
  Synthetic Sequence
ctcaactttg

SEQ ID NO: 8008 - DNA, 10 bp, Artificial Sequence
  Synthetic Sequence
aacgtcgaaa

SEQ ID NO: 8009 - DNA, 10 bp, Artificial Sequence
  Synthetic Sequence
tactggcact

SEQ ID NO: 8010 - DNA, 10 bp, Artificial Sequence
  Synthetic Sequence
cgtaggcgtg

SEQ ID NO: 8011 - DNA, 10 bp, Artificial Sequence
  Synthetic Sequence
ggcagacgta

SEQ ID NO: 8012 - DNA, 10 bp, Artificial Sequence
  Synthetic Sequence
acctagtcta

SEQ ID NO: 8013 - DNA, 10 bp, Artificial Sequence
  Synthetic Sequence
ggtgcagacc

SEQ ID NO: 8014 - DNA, 10 bp, Artificial Sequence
  Synthetic Sequence
tggacacacg

SEQ ID NO: 8015 - DNA, 10 bp, Artificial Sequence
  Synthetic Sequence
taagatatag

SEQ ID NO: 8016 - DNA, 10 bp, Artificial Sequence
  Synthetic Sequence
tgcgaataga

SEQ ID NO: 8017 - DNA, 10 bp, Artificial Sequence
  Synthetic Sequence
caggattgtt

SEQ ID NO: 8018 - DNA, 10 bp, Artificial Sequence
  Synthetic Sequence
cacatgccgc

SEQ ID NO: 8019 - DNA, 10 bp, Artificial Sequence
  Synthetic Sequence
ttggacgctc

SEQ ID NO: 8020 - DNA, 10 bp, Artificial Sequence
  Synthetic Sequence
acgggtaggg

SEQ ID NO: 8021 - DNA, 10 bp, Artificial Sequence
  Synthetic Sequence
atttctgagc

SEQ ID NO: 8022 - DNA, 10 bp, Artificial Sequence
  Synthetic Sequence
acacctaaca

SEQ ID NO: 8023 - DNA, 10 bp, Artificial Sequence
  Synthetic Sequence
tacgcgcgca

SEQ ID NO: 8024 - DNA, 10 bp, Artificial Sequence
  Synthetic Sequence
actcctttca

SEQ ID NO: 8025 - DNA, 10 bp, Artificial Sequence
  Synthetic Sequence
ctgtagttcc

SEQ ID NO: 8026 - DNA, 10 bp, Artificial Sequence
  Synthetic Sequence
gcgcgtaacc

SEQ ID NO: 8027 - DNA, 10 bp, Artificial Sequence
  Synthetic Sequence
gtgtgtcgga

SEQ ID NO: 8028 - DNA, 10 bp, Artificial Sequence
  Synthetic Sequence
ttctgcgtcc

SEQ ID NO: 8029 - DNA, 10 bp, Artificial Sequence
  Synthetic Sequence
agaggtctcg

SEQ ID NO: 8030 - DNA, 10 bp, Artificial Sequence
  Synthetic Sequence
cccacctcac

SEQ ID NO: 8031 - DNA, 10 bp, Artificial Sequence
  Synthetic Sequence
aactcatgtc

SEQ ID NO: 8032 - DNA, 10 bp, Artificial Sequence
  Synthetic Sequence
atctatccaa

SEQ ID NO: 8033 - DNA, 10 bp, Artificial Sequence
  Synthetic Sequence
agtcttgcag

SEQ ID NO: 8034 - DNA, 10 bp, Artificial Sequence
  Synthetic Sequence
tcgtaagaaa

SEQ ID NO: 8035 - DNA, 10 bp, Artificial Sequence
  Synthetic Sequence
cccagaagca

SEQ ID NO: 8036 - DNA, 10 bp, Artificial Sequence
  Synthetic Sequence
aattggccta

SEQ ID NO: 8037 - DNA, 10 bp, Artificial Sequence
  Synthetic Sequence
cgcccaagtc

SEQ ID NO: 8038 - DNA, 10 bp, Artificial Sequence
  Synthetic Sequence
caaccctggg

SEQ ID NO: 8039 - DNA, 10 bp, Artificial Sequence
  Synthetic Sequence
tggcctaagg

SEQ ID NO: 8040 - DNA, 10 bp, Artificial Sequence
  Synthetic Sequence
catcgaaagg

SEQ ID NO: 8041 - DNA, 10 bp, Artificial Sequence
  Synthetic Sequence
tgataacgca

SEQ ID NO: 8042 - DNA, 10 bp, Artificial Sequence
  Synthetic Sequence
gaaagacact

SEQ ID NO: 8043 - DNA, 10 bp, Artificial Sequence
  Synthetic Sequence
gcggaaagtc

SEQ ID NO: 8044 - DNA, 10 bp, Artificial Sequence
  Synthetic Sequence
ctcgtaagct

SEQ ID NO: 8045 - DNA, 10 bp, Artificial Sequence
  Synthetic Sequence
tgagtgcatt

SEQ ID NO: 8046 - DNA, 10 bp, Artificial Sequence
  Synthetic Sequence
gaaatgaaga

SEQ ID NO: 8047 - DNA, 10 bp, Artificial Sequence
  Synthetic Sequence
atatccggac

SEQ ID NO: 8048 - DNA, 10 bp, Artificial Sequence
  Synthetic Sequence
agatgcaacc

SEQ ID NO: 8049 - DNA, 10 bp, Artificial Sequence
  Synthetic Sequence
attataaacg

SEQ ID NO: 8050 - DNA, 10 bp, Artificial Sequence
  Synthetic Sequence
cttgggactc

SEQ ID NO: 8051 - DNA, 10 bp, Artificial Sequence
  Synthetic Sequence
ccactgacat

SEQ ID NO: 8052 - DNA, 10 bp, Artificial Sequence
  Synthetic Sequence
gatattggtt

SEQ ID NO: 8053 - DNA, 10 bp, Artificial Sequence
  Synthetic Sequence
agacggtcga

SEQ ID NO: 8054 - DNA, 10 bp, Artificial Sequence
  Synthetic Sequence
aacatgatgt

SEQ ID NO: 8055 - DNA, 10 bp, Artificial Sequence
  Synthetic Sequence
aagtcgctgg

SEQ ID NO: 8056 - DNA, 10 bp, Artificial Sequence
  Synthetic Sequence
tcttgtctga

SEQ ID NO: 8057 - DNA, 10 bp, Artificial Sequence
  Synthetic Sequence
tttggatacc

SEQ ID NO: 8058 - DNA, 10 bp, Artificial Sequence
  Synthetic Sequence
ggctaccatg

SEQ ID NO: 8059 - DNA, 10 bp, Artificial Sequence
  Synthetic Sequence
ctgcaatgag

SEQ ID NO: 8060 - DNA, 10 bp, Artificial Sequence
  Synthetic Sequence
gattacaaag

SEQ ID NO: 8061 - DNA, 10 bp, Artificial Sequence
  Synthetic Sequence
taccgtaata

SEQ ID NO: 8062 - DNA, 10 bp, Artificial Sequence
  Synthetic Sequence
aatactacga

SEQ ID NO: 8063 - DNA, 10 bp, Artificial Sequence
  Synthetic Sequence
tacgattcct

SEQ ID NO: 8064 - DNA, 10 bp, Artificial Sequence
  Synthetic Sequence
agacgctgtc

SEQ ID NO: 8065 - DNA, 10 bp, Artificial Sequence
  Synthetic Sequence
tgagctccga

SEQ ID NO: 8066 - DNA, 10 bp, Artificial Sequence
  Synthetic Sequence
ctattcataa

SEQ ID NO: 8067 - DNA, 10 bp, Artificial Sequence
  Synthetic Sequence
tcagaaagct

SEQ ID NO: 8068 - DNA, 10 bp, Artificial Sequence
  Synthetic Sequence
aacaatgcga

SEQ ID NO: 8069 - DNA, 10 bp, Artificial Sequence
  Synthetic Sequence
cacactcagt

SEQ ID NO: 8070 - DNA, 10 bp, Artificial Sequence
  Synthetic Sequence
aacgtatgtg

SEQ ID NO: 8071 - DNA, 10 bp, Artificial Sequence
  Synthetic Sequence
catcatctct

SEQ ID NO: 8072 - DNA, 10 bp, Artificial Sequence
  Synthetic Sequence
gtcacgccac

SEQ ID NO: 8073 - DNA, 10 bp, Artificial Sequence
  Synthetic Sequence
tatcaaacgc

SEQ ID NO: 8074 - DNA, 10 bp, Artificial Sequence
  Synthetic Sequence
agctgtgcgc

SEQ ID NO: 8075 - DNA, 10 bp, Artificial Sequence
  Synthetic Sequence
atcggtgatg

SEQ ID NO: 8076 - DNA, 10 bp, Artificial Sequence
  Synthetic Sequence
gtcattgatc

SEQ ID NO: 8077 - DNA, 10 bp, Artificial Sequence
  Synthetic Sequence
caactacagt

SEQ ID NO: 8078 - DNA, 10 bp, Artificial Sequence
  Synthetic Sequence
ggctgtctgt

SEQ ID NO: 8079 - DNA, 10 bp, Artificial Sequence
  Synthetic Sequence
ccacgaagta

SEQ ID NO: 8080 - DNA, 10 bp, Artificial Sequence
  Synthetic Sequence
agtacgtttc

SEQ ID NO: 8081 - DNA, 10 bp, Artificial Sequence
  Synthetic Sequence
ccaggcacaa

SEQ ID NO: 8082 - DNA, 10 bp, Artificial Sequence
  Synthetic Sequence
cgcggtcgat

SEQ ID NO: 8083 - DNA, 10 bp, Artificial Sequence
  Synthetic Sequence
cgccaaagcg

SEQ ID NO: 8084 - DNA, 10 bp, Artificial Sequence
  Synthetic Sequence
gacagtactc

SEQ ID NO: 8085 - DNA, 10 bp, Artificial Sequence
  Synthetic Sequence
ctgctcaact

SEQ ID NO: 8086 - DNA, 10 bp, Artificial Sequence
  Synthetic Sequence
gggagttggt

SEQ ID NO: 8087 - DNA, 10 bp, Artificial Sequence
  Synthetic Sequence
agactttcgt

SEQ ID NO: 8088 - DNA, 10 bp, Artificial Sequence
  Synthetic Sequence
aactagtgtg

SEQ ID NO: 8089 - DNA, 10 bp, Artificial Sequence
  Synthetic Sequence
gcgacacgag

SEQ ID NO: 8090 - DNA, 10 bp, Artificial Sequence
  Synthetic Sequence
gtggtgtccg

SEQ ID NO: 8091 - DNA, 10 bp, Artificial Sequence
  Synthetic Sequence
tacttaggat

SEQ ID NO: 8092 - DNA, 10 bp, Artificial Sequence
  Synthetic Sequence
caacttaata

SEQ ID NO: 8093 - DNA, 10 bp, Artificial Sequence
  Synthetic Sequence
tatcagtagc

SEQ ID NO: 8094 - DNA, 10 bp, Artificial Sequence
  Synthetic Sequence
gatgccgagt

SEQ ID NO: 8095 - DNA, 10 bp, Artificial Sequence
  Synthetic Sequence
catattcttt

SEQ ID NO: 8096 - DNA, 10 bp, Artificial Sequence
  Synthetic Sequence
tcttgcgagc

SEQ ID NO: 8097 - DNA, 10 bp, Artificial Sequence
  Synthetic Sequence
gcgacattat

SEQ ID NO: 8098 - DNA, 10 bp, Artificial Sequence
  Synthetic Sequence
cacccattgc

SEQ ID NO: 8099 - DNA, 10 bp, Artificial Sequence
  Synthetic Sequence
gaggcattca

SEQ ID NO: 8100 - DNA, 10 bp, Artificial Sequence
  Synthetic Sequence
ctaccgcgtg

SEQ ID NO: 8101 - DNA, 10 bp, Artificial Sequence
  Synthetic Sequence
aacacccgac

SEQ ID NO: 8102 - DNA, 10 bp, Artificial Sequence
  Synthetic Sequence
tcatttaacc

SEQ ID NO: 8103 - DNA, 10 bp, Artificial Sequence
  Synthetic Sequence
tgtcccgata

SEQ ID NO: 8104 - DNA, 10 bp, Artificial Sequence
  Synthetic Sequence
gtagttgggt

SEQ ID NO: 8105 - DNA, 10 bp, Artificial Sequence
  Synthetic Sequence
acaagccaac

SEQ ID NO: 8106 - DNA, 10 bp, Artificial Sequence
  Synthetic Sequence
aatccatatg

SEQ ID NO: 8107 - DNA, 10 bp, Artificial Sequence
  Synthetic Sequence
ctcctttgta

SEQ ID NO: 8108 - DNA, 10 bp, Artificial Sequence
  Synthetic Sequence
cgtgccctac

SEQ ID NO: 8109 - DNA, 10 bp, Artificial Sequence
  Synthetic Sequence
agctattgac

SEQ ID NO: 8110 - DNA, 10 bp, Artificial Sequence
  Synthetic Sequence
cacgagaagt

SEQ ID NO: 8111 - DNA, 10 bp, Artificial Sequence
  Synthetic Sequence
atgacgcgtg

SEQ ID NO: 8112 - DNA, 10 bp, Artificial Sequence
  Synthetic Sequence
ctggcgatta

SEQ ID NO: 8113 - DNA, 10 bp, Artificial Sequence
  Synthetic Sequence
ggtacattac

SEQ ID NO: 8114 - DNA, 10 bp, Artificial Sequence
  Synthetic Sequence
cttaactata

SEQ ID NO: 8115 - DNA, 10 bp, Artificial Sequence
  Synthetic Sequence
attagacttg

SEQ ID NO: 8116 - DNA, 10 bp, Artificial Sequence
  Synthetic Sequence
ggcctatatg

SEQ ID NO: 8117 - DNA, 10 bp, Artificial Sequence
  Synthetic Sequence
attaccaaca

SEQ ID NO: 8118 - DNA, 10 bp, Artificial Sequence
  Synthetic Sequence
ccgaagggtc

SEQ ID NO: 8119 - DNA, 10 bp, Artificial Sequence
  Synthetic Sequence
aatgcaggaa

SEQ ID NO: 8120 - DNA, 10 bp, Artificial Sequence
  Synthetic Sequence
atacgcgtga

SEQ ID NO: 8121 - DNA, 10 bp, Artificial Sequence
  Synthetic Sequence
ccgataaatt

SEQ ID NO: 8122 - DNA, 10 bp, Artificial Sequence
  Synthetic Sequence
catatgaacg

SEQ ID NO: 8123 - DNA, 10 bp, Artificial Sequence
  Synthetic Sequence
cggtccacta

SEQ ID NO: 8124 - DNA, 10 bp, Artificial Sequence
  Synthetic Sequence
tgagacagat

SEQ ID NO: 8125 - DNA, 10 bp, Artificial Sequence
  Synthetic Sequence
gggtctgatt

SEQ ID NO: 8126 - DNA, 10 bp, Artificial Sequence
  Synthetic Sequence
tagtaaatgc

SEQ ID NO: 8127 - DNA, 10 bp, Artificial Sequence
  Synthetic Sequence
actcccgtcc

SEQ ID NO: 8128 - DNA, 10 bp, Artificial Sequence
  Synthetic Sequence
ttgataagcg

SEQ ID NO: 8129 - DNA, 10 bp, Artificial Sequence
  Synthetic Sequence
gcgcttgtaa

SEQ ID NO: 8130 - DNA, 10 bp, Artificial Sequence
  Synthetic Sequence
cgacggctag

SEQ ID NO: 8131 - DNA, 10 bp, Artificial Sequence
  Synthetic Sequence
gaagcgccaa

SEQ ID NO: 8132 - DNA, 10 bp, Artificial Sequence
  Synthetic Sequence
gtgcattcat

SEQ ID NO: 8133 - DNA, 10 bp, Artificial Sequence
  Synthetic Sequence
tttagtaact

SEQ ID NO: 8134 - DNA, 10 bp, Artificial Sequence
  Synthetic Sequence
cgaggcgttc

SEQ ID NO: 8135 - DNA, 10 bp, Artificial Sequence
  Synthetic Sequence
atcacattaa

SEQ ID NO: 8136 - DNA, 10 bp, Artificial Sequence
  Synthetic Sequence
tttgtttcgc

SEQ ID NO: 8137 - DNA, 10 bp, Artificial Sequence
  Synthetic Sequence
cctagaacgg

SEQ ID NO: 8138 - DNA, 10 bp, Artificial Sequence
  Synthetic Sequence
cctgacatag

SEQ ID NO: 8139 - DNA, 10 bp, Artificial Sequence
  Synthetic Sequence
tccctctgta

SEQ ID NO: 8140 - DNA, 10 bp, Artificial Sequence
  Synthetic Sequence
tagtgaggtg

SEQ ID NO: 8141 - DNA, 10 bp, Artificial Sequence
  Synthetic Sequence
gaacgcagta

SEQ ID NO: 8142 - DNA, 10 bp, Artificial Sequence
  Synthetic Sequence
gaccctccta

SEQ ID NO: 8143 - DNA, 10 bp, Artificial Sequence
  Synthetic Sequence
tgcagcttgt

SEQ ID NO: 8144 - DNA, 10 bp, Artificial Sequence
  Synthetic Sequence
tggaattggg

SEQ ID NO: 8145 - DNA, 10 bp, Artificial Sequence
  Synthetic Sequence
tcgcacgtat

SEQ ID NO: 8146 - DNA, 10 bp, Artificial Sequence
  Synthetic Sequence
tttctacgta

SEQ ID NO: 8147 - DNA, 10 bp, Artificial Sequence
  Synthetic Sequence
taaccagata

SEQ ID NO: 8148 - DNA, 10 bp, Artificial Sequence
  Synthetic Sequence
ttgcacgttg

SEQ ID NO: 8149 - DNA, 10 bp, Artificial Sequence
  Synthetic Sequence
ttctcccttc

SEQ ID NO: 8150 - DNA, 10 bp, Artificial Sequence
  Synthetic Sequence
ccacggtgca

SEQ ID NO: 8151 - DNA, 10 bp, Artificial Sequence
  Synthetic Sequence
ctacaagagg

SEQ ID NO: 8152 - DNA, 10 bp, Artificial Sequence
  Synthetic Sequence
caaaggttga

SEQ ID NO: 8153 - DNA, 10 bp, Artificial Sequence
  Synthetic Sequence
actgagcttt

SEQ ID NO: 8154 - DNA, 10 bp, Artificial Sequence
  Synthetic Sequence
atcaggtagc

SEQ ID NO: 8155 - DNA, 10 bp, Artificial Sequence
  Synthetic Sequence
ctcctctcat

SEQ ID NO: 8156 - DNA, 10 bp, Artificial Sequence
  Synthetic Sequence
ctgagtttgc

SEQ ID NO: 8157 - DNA, 10 bp, Artificial Sequence
  Synthetic Sequence
atgtaaagta

SEQ ID NO: 8158 - DNA, 10 bp, Artificial Sequence
  Synthetic Sequence
ccagcggaac

SEQ ID NO: 8159 - DNA, 10 bp, Artificial Sequence
  Synthetic Sequence
tacagtcaac

SEQ ID NO: 8160 - DNA, 10 bp, Artificial Sequence
  Synthetic Sequence
ctgatcgggt

SEQ ID NO: 8161 - DNA, 10 bp, Artificial Sequence
  Synthetic Sequence
acccgccatg

SEQ ID NO: 8162 - DNA, 10 bp, Artificial Sequence
  Synthetic Sequence
caagctgtta

SEQ ID NO: 8163 - DNA, 10 bp, Artificial Sequence
  Synthetic Sequence
gtttatgatg

SEQ ID NO: 8164 - DNA, 10 bp, Artificial Sequence
  Synthetic Sequence
tcatctattt

SEQ ID NO: 8165 - DNA, 10 bp, Artificial Sequence
  Synthetic Sequence
aaatgcatcg

SEQ ID NO: 8166 - DNA, 10 bp, Artificial Sequence
  Synthetic Sequence
aatcgagtct

SEQ ID NO: 8167 - DNA, 10 bp, Artificial Sequence
  Synthetic Sequence
aatccgctac

SEQ ID NO: 8168 - DNA, 10 bp, Artificial Sequence
  Synthetic Sequence
cgtaccgttc

SEQ ID NO: 8169 - DNA, 10 bp, Artificial Sequence
  Synthetic Sequence
cgcaagttag

SEQ ID NO: 8170 - DNA, 10 bp, Artificial Sequence
  Synthetic Sequence
cgcagcactg

SEQ ID NO: 8171 - DNA, 10 bp, Artificial Sequence
  Synthetic Sequence
cagagagctt

SEQ ID NO: 8172 - DNA, 10 bp, Artificial Sequence
  Synthetic Sequence
agattgagca

SEQ ID NO: 8173 - DNA, 10 bp, Artificial Sequence
  Synthetic Sequence
gagcatttaa

SEQ ID NO: 8174 - DNA, 10 bp, Artificial Sequence
  Synthetic Sequence
aagccctgag

SEQ ID NO: 8175 - DNA, 10 bp, Artificial Sequence
  Synthetic Sequence
atctactcct

SEQ ID NO: 8176 - DNA, 10 bp, Artificial Sequence
  Synthetic Sequence
gaaagagaag

SEQ ID NO: 8177 - DNA, 10 bp, Artificial Sequence
  Synthetic Sequence
ccaccttggc

SEQ ID NO: 8178 - DNA, 10 bp, Artificial Sequence
  Synthetic Sequence
acgcatcatt

SEQ ID NO: 8179 - DNA, 10 bp, Artificial Sequence
  Synthetic Sequence
gtcggataca

SEQ ID NO: 8180 - DNA, 10 bp, Artificial Sequence
  Synthetic Sequence
atacatttgc

SEQ ID NO: 8181 - DNA, 10 bp, Artificial Sequence
  Synthetic Sequence
ttaccgctaa

SEQ ID NO: 8182 - DNA, 10 bp, Artificial Sequence
  Synthetic Sequence
cgtaccacac

SEQ ID NO: 8183 - DNA, 10 bp, Artificial Sequence
  Synthetic Sequence
agattatgcc

SEQ ID NO: 8184 - DNA, 10 bp, Artificial Sequence
  Synthetic Sequence
ggttgaggct

SEQ ID NO: 8185 - DNA, 10 bp, Artificial Sequence
  Synthetic Sequence
tacttcgctt

SEQ ID NO: 8186 - DNA, 10 bp, Artificial Sequence
  Synthetic Sequence
tcgttctatt

SEQ ID NO: 8187 - DNA, 10 bp, Artificial Sequence
  Synthetic Sequence
ggtcctatac

SEQ ID NO: 8188 - DNA, 10 bp, Artificial Sequence
  Synthetic Sequence
tcatacatgc

SEQ ID NO: 8189 - DNA, 10 bp, Artificial Sequence
  Synthetic Sequence
acgttcgccc

SEQ ID NO: 8190 - DNA, 10 bp, Artificial Sequence
  Synthetic Sequence
aaccgtgcgt

SEQ ID NO: 8191 - DNA, 10 bp, Artificial Sequence
  Synthetic Sequence
gagctgattt

SEQ ID NO: 8192 - DNA, 10 bp, Artificial Sequence
  Synthetic Sequence
taatgtgatt

SEQ ID NO: 8193 - DNA, 10 bp, Artificial Sequence
  Synthetic Sequence
gcacttaagg

SEQ ID NO: 8194 - DNA, 10 bp, Artificial Sequence
  Synthetic Sequence
cagccgtgtc

SEQ ID NO: 8195 - DNA, 10 bp, Artificial Sequence
  Synthetic Sequence
cgacaccgag

SEQ ID NO: 8196 - DNA, 10 bp, Artificial Sequence
  Synthetic Sequence
aaagtagaac

SEQ ID NO: 8197 - DNA, 10 bp, Artificial Sequence
  Synthetic Sequence
tcttctcggg

SEQ ID NO: 8198 - DNA, 10 bp, Artificial Sequence
  Synthetic Sequence
cttgtcccgt

SEQ ID NO: 8199 - DNA, 10 bp, Artificial Sequence
  Synthetic Sequence
tggacgtggc

SEQ ID NO: 8200 - DNA, 10 bp, Artificial Sequence
  Synthetic Sequence
cggaatattt

SEQ ID NO: 8201 - DNA, 10 bp, Artificial Sequence
  Synthetic Sequence
gcgctcagca

SEQ ID NO: 8202 - DNA, 10 bp, Artificial Sequence
  Synthetic Sequence
gtgtttgcgt

SEQ ID NO: 8203 - DNA, 10 bp, Artificial Sequence
  Synthetic Sequence
gattcctcgt

SEQ ID NO: 8204 - DNA, 10 bp, Artificial Sequence
  Synthetic Sequence
cgttggagac

SEQ ID NO: 8205 - DNA, 10 bp, Artificial Sequence
  Synthetic Sequence
cgaaacgcca

SEQ ID NO: 8206 - DNA, 10 bp, Artificial Sequence
  Synthetic Sequence
tcgagccagg

SEQ ID NO: 8207 - DNA, 10 bp, Artificial Sequence
  Synthetic Sequence
ggtgtcgtta

SEQ ID NO: 8208 - DNA, 10 bp, Artificial Sequence
  Synthetic Sequence
acaaactggg

SEQ ID NO: 8209 - DNA, 10 bp, Artificial Sequence
  Synthetic Sequence
aagctgcgac

SEQ ID NO: 8210 - DNA, 10 bp, Artificial Sequence
  Synthetic Sequence
tatcttgtgt

SEQ ID NO: 8211 - DNA, 10 bp, Artificial Sequence
  Synthetic Sequence
caacctcctt

SEQ ID NO: 8212 - DNA, 10 bp, Artificial Sequence
  Synthetic Sequence
ttagatctgg

SEQ ID NO: 8213 - DNA, 10 bp, Artificial Sequence
  Synthetic Sequence
caatcatcca

SEQ ID NO: 8214 - DNA, 10 bp, Artificial Sequence
  Synthetic Sequence
caccagggag

SEQ ID NO: 8215 - DNA, 10 bp, Artificial Sequence
  Synthetic Sequence
tgggcttaaa

SEQ ID NO: 8216 - DNA, 10 bp, Artificial Sequence
  Synthetic Sequence
tgcagtaagt

SEQ ID NO: 8217 - DNA, 10 bp, Artificial Sequence
  Synthetic Sequence
acgcccacag

SEQ ID NO: 8218 - DNA, 10 bp, Artificial Sequence
  Synthetic Sequence
gcggtaacca

SEQ ID NO: 8219 - DNA, 10 bp, Artificial Sequence
  Synthetic Sequence
agtggtatag

SEQ ID NO: 8220 - DNA, 10 bp, Artificial Sequence
  Synthetic Sequence
atctcaccta

SEQ ID NO: 8221 - DNA, 10 bp, Artificial Sequence
  Synthetic Sequence
tgcattacat

SEQ ID NO: 8222 - DNA, 10 bp, Artificial Sequence
  Synthetic Sequence
tattggatca

SEQ ID NO: 8223 - DNA, 10 bp, Artificial Sequence
  Synthetic Sequence
acgagcgatt

SEQ ID NO: 8224 - DNA, 10 bp, Artificial Sequence
  Synthetic Sequence
ggcaccatag

SEQ ID NO: 8225 - DNA, 10 bp, Artificial Sequence
  Synthetic Sequence
aagcagtacg

SEQ ID NO: 8226 - DNA, 10 bp, Artificial Sequence
  Synthetic Sequence
ggagtcgtgc

SEQ ID NO: 8227 - DNA, 10 bp, Artificial Sequence
  Synthetic Sequence
agaccttgag

SEQ ID NO: 8228 - DNA, 10 bp, Artificial Sequence
  Synthetic Sequence
tggataaatc

SEQ ID NO: 8229 - DNA, 10 bp, Artificial Sequence
  Synthetic Sequence
aacgggctac

SEQ ID NO: 8230 - DNA, 10 bp, Artificial Sequence
  Synthetic Sequence
acgtactaga

SEQ ID NO: 8231 - DNA, 10 bp, Artificial Sequence
  Synthetic Sequence
tcccttctca

SEQ ID NO: 8232 - DNA, 10 bp, Artificial Sequence
  Synthetic Sequence
aattgggtcg

SEQ ID NO: 8233 - DNA, 10 bp, Artificial Sequence
  Synthetic Sequence
tggcgactta

SEQ ID NO: 8234 - DNA, 10 bp, Artificial Sequence
  Synthetic Sequence
aacttggcga

SEQ ID NO: 8235 - DNA, 10 bp, Artificial Sequence
  Synthetic Sequence
actgtagaaa

SEQ ID NO: 8236 - DNA, 10 bp, Artificial Sequence
  Synthetic Sequence
tgtcctttga

SEQ ID NO: 8237 - DNA, 10 bp, Artificial Sequence
  Synthetic Sequence
tatcattact

SEQ ID NO: 8238 - DNA, 10 bp, Artificial Sequence
  Synthetic Sequence
ccataggact

SEQ ID NO: 8239 - DNA, 10 bp, Artificial Sequence
  Synthetic Sequence
tctaatatcg

SEQ ID NO: 8240 - DNA, 10 bp, Artificial Sequence
  Synthetic Sequence
ctattgcttt

SEQ ID NO: 8241 - DNA, 10 bp, Artificial Sequence
  Synthetic Sequence
tcgacgtttc

SEQ ID NO: 8242 - DNA, 10 bp, Artificial Sequence
  Synthetic Sequence
gccctcttct

SEQ ID NO: 8243 - DNA, 10 bp, Artificial Sequence
  Synthetic Sequence
cgtgcacgat

SEQ ID NO: 8244 - DNA, 10 bp, Artificial Sequence
  Synthetic Sequence
gcctcacctt

SEQ ID NO: 8245 - DNA, 10 bp, Artificial Sequence
  Synthetic Sequence
cgccttcgct

SEQ ID NO: 8246 - DNA, 10 bp, Artificial Sequence
  Synthetic Sequence
gtagggctat

SEQ ID NO: 8247 - DNA, 10 bp, Artificial Sequence
  Synthetic Sequence
aaagcccaaa

SEQ ID NO: 8248 - DNA, 10 bp, Artificial Sequence
  Synthetic Sequence
ccgtgcagta

SEQ ID NO: 8249 - DNA, 10 bp, Artificial Sequence
  Synthetic Sequence
cccgtgggat

SEQ ID NO: 8250 - DNA, 10 bp, Artificial Sequence
  Synthetic Sequence
ggtctcgatc

SEQ ID NO: 8251 - DNA, 10 bp, Artificial Sequence
  Synthetic Sequence
aatagttcaa

SEQ ID NO: 8252 - DNA, 10 bp, Artificial Sequence
  Synthetic Sequence
tgatacctgt

SEQ ID NO: 8253 - DNA, 10 bp, Artificial Sequence
  Synthetic Sequence
tgggaacggt

SEQ ID NO: 8254 - DNA, 10 bp, Artificial Sequence
  Synthetic Sequence
ttggacaacc

SEQ ID NO: 8255 - DNA, 10 bp, Artificial Sequence
  Synthetic Sequence
cgtaggaatc

SEQ ID NO: 8256 - DNA, 10 bp, Artificial Sequence
  Synthetic Sequence
atttagtttc

SEQ ID NO: 8257 - DNA, 10 bp, Artificial Sequence
  Synthetic Sequence
caccgactac

SEQ ID NO: 8258 - DNA, 10 bp, Artificial Sequence
  Synthetic Sequence
ctctcggtct

SEQ ID NO: 8259 - DNA, 10 bp, Artificial Sequence
  Synthetic Sequence
cctcgatcat

SEQ ID NO: 8260 - DNA, 10 bp, Artificial Sequence
  Synthetic Sequence
agcagcagcc

SEQ ID NO: 8261 - DNA, 10 bp, Artificial Sequence
  Synthetic Sequence
tgcggtggag

SEQ ID NO: 8262 - DNA, 10 bp, Artificial Sequence
  Synthetic Sequence
ggacgaatag

SEQ ID NO: 8263 - DNA, 10 bp, Artificial Sequence
  Synthetic Sequence
catagctatc

SEQ ID NO: 8264 - DNA, 10 bp, Artificial Sequence
  Synthetic Sequence
cttgtagtat

SEQ ID NO: 8265 - DNA, 10 bp, Artificial Sequence
  Synthetic Sequence
gatctgaaac

SEQ ID NO: 8266 - DNA, 10 bp, Artificial Sequence
  Synthetic Sequence
aggaccttta

SEQ ID NO: 8267 - DNA, 10 bp, Artificial Sequence
  Synthetic Sequence
ttcatgggta

SEQ ID NO: 8268 - DNA, 10 bp, Artificial Sequence
  Synthetic Sequence
ctcggattat

SEQ ID NO: 8269 - DNA, 10 bp, Artificial Sequence
  Synthetic Sequence
gcgcacagtg

SEQ ID NO: 8270 - DNA, 10 bp, Artificial Sequence
  Synthetic Sequence
attgtactta

SEQ ID NO: 8271 - DNA, 10 bp, Artificial Sequence
  Synthetic Sequence
gctcgctgga

SEQ ID NO: 8272 - DNA, 10 bp, Artificial Sequence
  Synthetic Sequence
tgctgagcgt

SEQ ID NO: 8273 - DNA, 10 bp, Artificial Sequence
  Synthetic Sequence
tccaagagcc

SEQ ID NO: 8274 - DNA, 10 bp, Artificial Sequence
  Synthetic Sequence
ctggtaggga

SEQ ID NO: 8275 - DNA, 10 bp, Artificial Sequence
  Synthetic Sequence
cccgtgacca

SEQ ID NO: 8276 - DNA, 10 bp, Artificial Sequence
  Synthetic Sequence
tcgacggagt

SEQ ID NO: 8277 - DNA, 10 bp, Artificial Sequence
  Synthetic Sequence
cgatcgaccg

SEQ ID NO: 8278 - DNA, 10 bp, Artificial Sequence
  Synthetic Sequence
accgtcggtc

SEQ ID NO: 8279 - DNA, 10 bp, Artificial Sequence
  Synthetic Sequence
aagattcaga

SEQ ID NO: 8280 - DNA, 10 bp, Artificial Sequence
  Synthetic Sequence
ttccaccatt

SEQ ID NO: 8281 - DNA, 10 bp, Artificial Sequence
  Synthetic Sequence
gaggcgtctc

SEQ ID NO: 8282 - DNA, 10 bp, Artificial Sequence
  Synthetic Sequence
tactagtggc

SEQ ID NO: 8283 - DNA, 10 bp, Artificial Sequence
  Synthetic Sequence
ttggtgacaa

SEQ ID NO: 8284 - DNA, 10 bp, Artificial Sequence
  Synthetic Sequence
atggttgctc

SEQ ID NO: 8285 - DNA, 10 bp, Artificial Sequence
  Synthetic Sequence
gcagagaacc

SEQ ID NO: 8286 - DNA, 10 bp, Artificial Sequence
  Synthetic Sequence
gccaccactc

SEQ ID NO: 8287 - DNA, 10 bp, Artificial Sequence
  Synthetic Sequence
agcggtcatc

SEQ ID NO: 8288 - DNA, 10 bp, Artificial Sequence
  Synthetic Sequence
gaatatgctt

SEQ ID NO: 8289 - DNA, 10 bp, Artificial Sequence
  Synthetic Sequence
tgacagattg

SEQ ID NO: 8290 - DNA, 10 bp, Artificial Sequence
  Synthetic Sequence
tcgtggagcc

SEQ ID NO: 8291 - DNA, 10 bp, Artificial Sequence
  Synthetic Sequence
gatagtccgt

SEQ ID NO: 8292 - DNA, 10 bp, Artificial Sequence
  Synthetic Sequence
gatattagaa

SEQ ID NO: 8293 - DNA, 10 bp, Artificial Sequence
  Synthetic Sequence
agtaatgggc

SEQ ID NO: 8294 - DNA, 10 bp, Artificial Sequence
  Synthetic Sequence
agagaagtag

SEQ ID NO: 8295 - DNA, 10 bp, Artificial Sequence
  Synthetic Sequence
tccaccggtc

SEQ ID NO: 8296 - DNA, 10 bp, Artificial Sequence
  Synthetic Sequence
gtgaacccta

SEQ ID NO: 8297 - DNA, 10 bp, Artificial Sequence
  Synthetic Sequence
ctcgacgacg

SEQ ID NO: 8298 - DNA, 10 bp, Artificial Sequence
  Synthetic Sequence
tcaacggtga

SEQ ID NO: 8299 - DNA, 10 bp, Artificial Sequence
  Synthetic Sequence
gaatgctaga

SEQ ID NO: 8300 - DNA, 10 bp, Artificial Sequence
  Synthetic Sequence
tgtccataaa

SEQ ID NO: 8301 - DNA, 10 bp, Artificial Sequence
  Synthetic Sequence
ttctgtcaca

SEQ ID NO: 8302 - DNA, 10 bp, Artificial Sequence
  Synthetic Sequence
tcgagactaa

SEQ ID NO: 8303 - DNA, 10 bp, Artificial Sequence
  Synthetic Sequence
cggaatacgg

SEQ ID NO: 8304 - DNA, 10 bp, Artificial Sequence
  Synthetic Sequence
acatcagccc

SEQ ID NO: 8305 - DNA, 10 bp, Artificial Sequence
  Synthetic Sequence
agtagattgg

SEQ ID NO: 8306 - DNA, 10 bp, Artificial Sequence
  Synthetic Sequence
ccaccacatt

SEQ ID NO: 8307 - DNA, 10 bp, Artificial Sequence
  Synthetic Sequence
tagaagcgcg

SEQ ID NO: 8308 - DNA, 10 bp, Artificial Sequence
  Synthetic Sequence
agtgagatta

SEQ ID NO: 8309 - DNA, 10 bp, Artificial Sequence
  Synthetic Sequence
acgagtcacc

SEQ ID NO: 8310 - DNA, 10 bp, Artificial Sequence
  Synthetic Sequence
cggaccttac

SEQ ID NO: 8311 - DNA, 10 bp, Artificial Sequence
  Synthetic Sequence
acgattggtc

SEQ ID NO: 8312 - DNA, 10 bp, Artificial Sequence
  Synthetic Sequence
ccatctcctc

SEQ ID NO: 8313 - DNA, 10 bp, Artificial Sequence
  Synthetic Sequence
gcgtcgggta

SEQ ID NO: 8314 - DNA, 10 bp, Artificial Sequence
  Synthetic Sequence
gctaccgtac

SEQ ID NO: 8315 - DNA, 10 bp, Artificial Sequence
  Synthetic Sequence
tcacagaaca

SEQ ID NO: 8316 - DNA, 10 bp, Artificial Sequence
  Synthetic Sequence
gtgtaatgca

SEQ ID NO: 8317 - DNA, 10 bp, Artificial Sequence
  Synthetic Sequence
gcccgttaac

SEQ ID NO: 8318 - DNA, 10 bp, Artificial Sequence
  Synthetic Sequence
cagcgttggc

SEQ ID NO: 8319 - DNA, 10 bp, Artificial Sequence
  Synthetic Sequence
ccggaagagc

SEQ ID NO: 8320 - DNA, 10 bp, Artificial Sequence
  Synthetic Sequence
tttgcaccta

SEQ ID NO: 8321 - DNA, 10 bp, Artificial Sequence
  Synthetic Sequence
ggatgctgat

SEQ ID NO: 8322 - DNA, 10 bp, Artificial Sequence
  Synthetic Sequence
gtaagtgagg

SEQ ID NO: 8323 - DNA, 10 bp, Artificial Sequence
  Synthetic Sequence
cttaagtgtc

SEQ ID NO: 8324 - DNA, 10 bp, Artificial Sequence
  Synthetic Sequence
gtcaaagact

SEQ ID NO: 8325 - DNA, 10 bp, Artificial Sequence
  Synthetic Sequence
acggatggga

SEQ ID NO: 8326 - DNA, 10 bp, Artificial Sequence
  Synthetic Sequence
atttgaatct

SEQ ID NO: 8327 - DNA, 10 bp, Artificial Sequence
  Synthetic Sequence
gtaactatca

SEQ ID NO: 8328 - DNA, 10 bp, Artificial Sequence
  Synthetic Sequence
tactcggtgt

SEQ ID NO: 8329 - DNA, 10 bp, Artificial Sequence
  Synthetic Sequence
agagagttct

SEQ ID NO: 8330 - DNA, 10 bp, Artificial Sequence
  Synthetic Sequence
ggcataactg

SEQ ID NO: 8331 - DNA, 10 bp, Artificial Sequence
  Synthetic Sequence
gtcgggttgc

SEQ ID NO: 8332 - DNA, 10 bp, Artificial Sequence
  Synthetic Sequence
aggacgagcg

SEQ ID NO: 8333 - DNA, 10 bp, Artificial Sequence
  Synthetic Sequence
aagttggaac

SEQ ID NO: 8334 - DNA, 10 bp, Artificial Sequence
  Synthetic Sequence
tgttcctacg

SEQ ID NO: 8335 - DNA, 10 bp, Artificial Sequence
  Synthetic Sequence
aggagtgtga

SEQ ID NO: 8336 - DNA, 10 bp, Artificial Sequence
  Synthetic Sequence
acctttcctg

SEQ ID NO: 8337 - DNA, 10 bp, Artificial Sequence
  Synthetic Sequence
tgttcctcgc

SEQ ID NO: 8338 - DNA, 10 bp, Artificial Sequence
  Synthetic Sequence
gcagtcacta

SEQ ID NO: 8339 - DNA, 10 bp, Artificial Sequence
  Synthetic Sequence
ggtgcacgtg

SEQ ID NO: 8340 - DNA, 10 bp, Artificial Sequence
  Synthetic Sequence
cgttacccgc

SEQ ID NO: 8341 - DNA, 10 bp, Artificial Sequence
  Synthetic Sequence
actcgtttag

SEQ ID NO: 8342 - DNA, 10 bp, Artificial Sequence
  Synthetic Sequence
tttaaggatc

SEQ ID NO: 8343 - DNA, 10 bp, Artificial Sequence
  Synthetic Sequence
cgggcccaaa

SEQ ID NO: 8344 - DNA, 10 bp, Artificial Sequence
  Synthetic Sequence
tagagagcac

SEQ ID NO: 8345 - DNA, 10 bp, Artificial Sequence
  Synthetic Sequence
ttagtggtta

SEQ ID NO: 8346 - DNA, 10 bp, Artificial Sequence
  Synthetic Sequence
cagattacgt

SEQ ID NO: 8347 - DNA, 10 bp, Artificial Sequence
  Synthetic Sequence
ccttgactca

SEQ ID NO: 8348 - DNA, 10 bp, Artificial Sequence
  Synthetic Sequence
cgtataaatg

SEQ ID NO: 8349 - DNA, 10 bp, Artificial Sequence
  Synthetic Sequence
cccgatactc

SEQ ID NO: 8350 - DNA, 10 bp, Artificial Sequence
  Synthetic Sequence
accagcgtcg

SEQ ID NO: 8351 - DNA, 10 bp, Artificial Sequence
  Synthetic Sequence
agcccattgt

SEQ ID NO: 8352 - DNA, 10 bp, Artificial Sequence
  Synthetic Sequence
gcgaggtagg

SEQ ID NO: 8353 - DNA, 10 bp, Artificial Sequence
  Synthetic Sequence
ataagggccc

SEQ ID NO: 8354 - DNA, 10 bp, Artificial Sequence
  Synthetic Sequence
atgcctagga

SEQ ID NO: 8355 - DNA, 10 bp, Artificial Sequence
  Synthetic Sequence
acgaggttag

SEQ ID NO: 8356 - DNA, 10 bp, Artificial Sequence
  Synthetic Sequence
tgaataggtc

SEQ ID NO: 8357 - DNA, 10 bp, Artificial Sequence
  Synthetic Sequence
tcctgggtcg

SEQ ID NO: 8358 - DNA, 10 bp, Artificial Sequence
  Synthetic Sequence
gtgattgaga

SEQ ID NO: 8359 - DNA, 10 bp, Artificial Sequence
  Synthetic Sequence
agtatcagga

SEQ ID NO: 8360 - DNA, 10 bp, Artificial Sequence
  Synthetic Sequence
ccgctagcat

SEQ ID NO: 8361 - DNA, 10 bp, Artificial Sequence
  Synthetic Sequence
cgagggaatg

SEQ ID NO: 8362 - DNA, 10 bp, Artificial Sequence
  Synthetic Sequence
gtgttcacct

SEQ ID NO: 8363 - DNA, 10 bp, Artificial Sequence
  Synthetic Sequence
tcgaccggag

SEQ ID NO: 8364 - DNA, 10 bp, Artificial Sequence
  Synthetic Sequence
gttgtaactc

SEQ ID NO: 8365 - DNA, 10 bp, Artificial Sequence
  Synthetic Sequence
cccagtgtct

SEQ ID NO: 8366 - DNA, 10 bp, Artificial Sequence
  Synthetic Sequence
agcccacatt

SEQ ID NO: 8367 - DNA, 10 bp, Artificial Sequence
  Synthetic Sequence
tgtgttcgag

SEQ ID NO: 8368 - DNA, 10 bp, Artificial Sequence
  Synthetic Sequence
cgttatcaac

SEQ ID NO: 8369 - DNA, 10 bp, Artificial Sequence
  Synthetic Sequence
taacgcctga

SEQ ID NO: 8370 - DNA, 10 bp, Artificial Sequence
  Synthetic Sequence
cgttgggaaa

SEQ ID NO: 8371 - DNA, 10 bp, Artificial Sequence
  Synthetic Sequence
tttacgcgat

SEQ ID NO: 8372 - DNA, 10 bp, Artificial Sequence
  Synthetic Sequence
gagtggactc

SEQ ID NO: 8373 - DNA, 10 bp, Artificial Sequence
  Synthetic Sequence
tatacgtatg

SEQ ID NO: 8374 - DNA, 10 bp, Artificial Sequence
  Synthetic Sequence
cgtactctga

SEQ ID NO: 8375 - DNA, 10 bp, Artificial Sequence
  Synthetic Sequence
tactgtgccg

SEQ ID NO: 8376 - DNA, 10 bp, Artificial Sequence
  Synthetic Sequence
gttggcacag

SEQ ID NO: 8377 - DNA, 10 bp, Artificial Sequence
  Synthetic Sequence
tagagcatga

SEQ ID NO: 8378 - DNA, 10 bp, Artificial Sequence
  Synthetic Sequence
agcggtagac

SEQ ID NO: 8379 - DNA, 10 bp, Artificial Sequence
  Synthetic Sequence
cgggtatcct

SEQ ID NO: 8380 - DNA, 10 bp, Artificial Sequence
  Synthetic Sequence
gccgagtgta

SEQ ID NO: 8381 - DNA, 10 bp, Artificial Sequence
  Synthetic Sequence
cgatcgccta

SEQ ID NO: 8382 - DNA, 10 bp, Artificial Sequence
  Synthetic Sequence
gacaaacaac

SEQ ID NO: 8383 - DNA, 10 bp, Artificial Sequence
  Synthetic Sequence
taatccacga

SEQ ID NO: 8384 - DNA, 10 bp, Artificial Sequence
  Synthetic Sequence
ggtagggcaa

SEQ ID NO: 8385 - DNA, 10 bp, Artificial Sequence
  Synthetic Sequence
aatgcgtgct

SEQ ID NO: 8386 - DNA, 10 bp, Artificial Sequence
  Synthetic Sequence
ccaaattatg

SEQ ID NO: 8387 - DNA, 10 bp, Artificial Sequence
  Synthetic Sequence
acgaaggttg

SEQ ID NO: 8388 - DNA, 10 bp, Artificial Sequence
  Synthetic Sequence
cattattcat

SEQ ID NO: 8389 - DNA, 10 bp, Artificial Sequence
  Synthetic Sequence
atttcgaatc

SEQ ID NO: 8390 - DNA, 10 bp, Artificial Sequence
  Synthetic Sequence
atggaatcca

SEQ ID NO: 8391 - DNA, 10 bp, Artificial Sequence
  Synthetic Sequence
ggacttgcat

SEQ ID NO: 8392 - DNA, 10 bp, Artificial Sequence
  Synthetic Sequence
cctttaggtg

SEQ ID NO: 8393 - DNA, 10 bp, Artificial Sequence
  Synthetic Sequence
tttcatcatc

SEQ ID NO: 8394 - DNA, 10 bp, Artificial Sequence
  Synthetic Sequence
agctagttgt

SEQ ID NO: 8395 - DNA, 10 bp, Artificial Sequence
  Synthetic Sequence
ccagagttac

SEQ ID NO: 8396 - DNA, 10 bp, Artificial Sequence
  Synthetic Sequence
gtaaccgcag

SEQ ID NO: 8397 - DNA, 10 bp, Artificial Sequence
  Synthetic Sequence
ggcttctccc

SEQ ID NO: 8398 - DNA, 10 bp, Artificial Sequence
  Synthetic Sequence
gaggaagtga

SEQ ID NO: 8399 - DNA, 10 bp, Artificial Sequence
  Synthetic Sequence
gtcccgattg

SEQ ID NO: 8400 - DNA, 10 bp, Artificial Sequence
  Synthetic Sequence
ctcctaggca

SEQ ID NO: 8401 - DNA, 10 bp, Artificial Sequence
  Synthetic Sequence
aaaccaccgt

SEQ ID NO: 8402 - DNA, 10 bp, Artificial Sequence
  Synthetic Sequence
tggtgtatgc

SEQ ID NO: 8403 - DNA, 10 bp, Artificial Sequence
  Synthetic Sequence
cgatattagg

SEQ ID NO: 8404 - DNA, 10 bp, Artificial Sequence
  Synthetic Sequence
tgcgtctgtg

SEQ ID NO: 8405 - DNA, 10 bp, Artificial Sequence
  Synthetic Sequence
gtatcagaag

SEQ ID NO: 8406 - DNA, 10 bp, Artificial Sequence
  Synthetic Sequence
gggagctgtc

SEQ ID NO: 8407 - DNA, 10 bp, Artificial Sequence
  Synthetic Sequence
cgtattccgg

SEQ ID NO: 8408 - DNA, 10 bp, Artificial Sequence
  Synthetic Sequence
ggcgacaacg

SEQ ID NO: 8409 - DNA, 10 bp, Artificial Sequence
  Synthetic Sequence
cacctcgatt

SEQ ID NO: 8410 - DNA, 10 bp, Artificial Sequence
  Synthetic Sequence
agggtacagg

SEQ ID NO: 8411 - DNA, 10 bp, Artificial Sequence
  Synthetic Sequence
gggctacacg

SEQ ID NO: 8412 - DNA, 10 bp, Artificial Sequence
  Synthetic Sequence
caccaagtta

SEQ ID NO: 8413 - DNA, 10 bp, Artificial Sequence
  Synthetic Sequence
gtcgactcta

SEQ ID NO: 8414 - DNA, 10 bp, Artificial Sequence
  Synthetic Sequence
tctgcctttg

SEQ ID NO: 8415 - DNA, 10 bp, Artificial Sequence
  Synthetic Sequence
agattcgaga

SEQ ID NO: 8416 - DNA, 10 bp, Artificial Sequence
  Synthetic Sequence
aagacaatca

SEQ ID NO: 8417 - DNA, 10 bp, Artificial Sequence
  Synthetic Sequence
tagctggagc

SEQ ID NO: 8418 - DNA, 10 bp, Artificial Sequence
  Synthetic Sequence
tagcctggtg

SEQ ID NO: 8419 - DNA, 10 bp, Artificial Sequence
  Synthetic Sequence
agtggctgcc

SEQ ID NO: 8420 - DNA, 10 bp, Artificial Sequence
  Synthetic Sequence
ttatgcgcac

SEQ ID NO: 8421 - DNA, 10 bp, Artificial Sequence
  Synthetic Sequence
tgtttgtatg

SEQ ID NO: 8422 - DNA, 10 bp, Artificial Sequence
  Synthetic Sequence
tagcctcaat

SEQ ID NO: 8423 - DNA, 10 bp, Artificial Sequence
  Synthetic Sequence
tctgaaacgt

SEQ ID NO: 8424 - DNA, 10 bp, Artificial Sequence
  Synthetic Sequence
gctagatcga

SEQ ID NO: 8425 - DNA, 10 bp, Artificial Sequence
  Synthetic Sequence
aataagtgga

SEQ ID NO: 8426 - DNA, 10 bp, Artificial Sequence
  Synthetic Sequence
gagtggcagc

SEQ ID NO: 8427 - DNA, 10 bp, Artificial Sequence
  Synthetic Sequence
aactcttcac

SEQ ID NO: 8428 - DNA, 10 bp, Artificial Sequence
  Synthetic Sequence
ggccttcaac

SEQ ID NO: 8429 - DNA, 10 bp, Artificial Sequence
  Synthetic Sequence
aggcgtacat

SEQ ID NO: 8430 - DNA, 10 bp, Artificial Sequence
  Synthetic Sequence
acccagacgg

SEQ ID NO: 8431 - DNA, 10 bp, Artificial Sequence
  Synthetic Sequence
acatcctcga

SEQ ID NO: 8432 - DNA, 10 bp, Artificial Sequence
  Synthetic Sequence
aaccttctag

SEQ ID NO: 8433 - DNA, 10 bp, Artificial Sequence
  Synthetic Sequence
taaatgcgta

SEQ ID NO: 8434 - DNA, 10 bp, Artificial Sequence
  Synthetic Sequence
gctttatatg

SEQ ID NO: 8435 - DNA, 10 bp, Artificial Sequence
  Synthetic Sequence
tcattcgggc

SEQ ID NO: 8436 - DNA, 10 bp, Artificial Sequence
  Synthetic Sequence
caatcccaag

SEQ ID NO: 8437 - DNA, 10 bp, Artificial Sequence
  Synthetic Sequence
ccagtccact

SEQ ID NO: 8438 - DNA, 10 bp, Artificial Sequence
  Synthetic Sequence
acccgagcac

SEQ ID NO: 8439 - DNA, 10 bp, Artificial Sequence
  Synthetic Sequence
tgggagtgcc

SEQ ID NO: 8440 - DNA, 10 bp, Artificial Sequence
  Synthetic Sequence
gatcaaagga

SEQ ID NO: 8441 - DNA, 10 bp, Artificial Sequence
  Synthetic Sequence
tgaggactac

SEQ ID NO: 8442 - DNA, 10 bp, Artificial Sequence
  Synthetic Sequence
atgggacact

SEQ ID NO: 8443 - DNA, 10 bp, Artificial Sequence
  Synthetic Sequence
taaggaaaga

SEQ ID NO: 8444 - DNA, 10 bp, Artificial Sequence
  Synthetic Sequence
aaatcacgag

SEQ ID NO: 8445 - DNA, 10 bp, Artificial Sequence
  Synthetic Sequence
catacacttg

SEQ ID NO: 8446 - DNA, 10 bp, Artificial Sequence
  Synthetic Sequence
tcacctagat

SEQ ID NO: 8447 - DNA, 10 bp, Artificial Sequence
  Synthetic Sequence
tctcacttac

SEQ ID NO: 8448 - DNA, 10 bp, Artificial Sequence
  Synthetic Sequence
gctaataagc

SEQ ID NO: 8449 - DNA, 10 bp, Artificial Sequence
  Synthetic Sequence
tcgcattatg

SEQ ID NO: 8450 - DNA, 10 bp, Artificial Sequence
  Synthetic Sequence
acttatactc

SEQ ID NO: 8451 - DNA, 10 bp, Artificial Sequence
  Synthetic Sequence
tgaaacttcg

SEQ ID NO: 8452 - DNA, 10 bp, Artificial Sequence
  Synthetic Sequence
ctactgtaaa

SEQ ID NO: 8453 - DNA, 10 bp, Artificial Sequence
  Synthetic Sequence
caaatgatct

SEQ ID NO: 8454 - DNA, 10 bp, Artificial Sequence
  Synthetic Sequence
acgcgcgtgt

SEQ ID NO: 8455 - DNA, 10 bp, Artificial Sequence
  Synthetic Sequence
cagtggcgac

SEQ ID NO: 8456 - DNA, 10 bp, Artificial Sequence
  Synthetic Sequence
tgaacacgtg

SEQ ID NO: 8457 - DNA, 10 bp, Artificial Sequence
  Synthetic Sequence
acgtacccaa

SEQ ID NO: 8458 - DNA, 10 bp, Artificial Sequence
  Synthetic Sequence
gagggtcgtt

SEQ ID NO: 8459 - DNA, 10 bp, Artificial Sequence
  Synthetic Sequence
gagacaattt

SEQ ID NO: 8460 - DNA, 10 bp, Artificial Sequence
  Synthetic Sequence
acttaatggt

SEQ ID NO: 8461 - DNA, 10 bp, Artificial Sequence
  Synthetic Sequence
cgatgcccag

SEQ ID NO: 8462 - DNA, 10 bp, Artificial Sequence
  Synthetic Sequence
ctgccttcga

SEQ ID NO: 8463 - DNA, 10 bp, Artificial Sequence
  Synthetic Sequence
ggactgtggg

SEQ ID NO: 8464 - DNA, 10 bp, Artificial Sequence
  Synthetic Sequence
gaaatcccgg

SEQ ID NO: 8465 - DNA, 10 bp, Artificial Sequence
  Synthetic Sequence
gcggaatcag

SEQ ID NO: 8466 - DNA, 10 bp, Artificial Sequence
  Synthetic Sequence
gagcacgtgc

SEQ ID NO: 8467 - DNA, 10 bp, Artificial Sequence
  Synthetic Sequence
gtaggcgcta

SEQ ID NO: 8468 - DNA, 10 bp, Artificial Sequence
  Synthetic Sequence
tcgtcgcacc

SEQ ID NO: 8469 - DNA, 10 bp, Artificial Sequence
  Synthetic Sequence
atacaagggc

SEQ ID NO: 8470 - DNA, 10 bp, Artificial Sequence
  Synthetic Sequence
aattcgattt

SEQ ID NO: 8471 - DNA, 10 bp, Artificial Sequence
  Synthetic Sequence
taggttcctt

SEQ ID NO: 8472 - DNA, 10 bp, Artificial Sequence
  Synthetic Sequence
tgtttgttat

SEQ ID NO: 8473 - DNA, 10 bp, Artificial Sequence
  Synthetic Sequence
aggtttcggc

SEQ ID NO: 8474 - DNA, 10 bp, Artificial Sequence
  Synthetic Sequence
ctacggcgaa

SEQ ID NO: 8475 - DNA, 10 bp, Artificial Sequence
  Synthetic Sequence
gcgaagctta

SEQ ID NO: 8476 - DNA, 10 bp, Artificial Sequence
  Synthetic Sequence
ctgtgaatgg

SEQ ID NO: 8477 - DNA, 10 bp, Artificial Sequence
  Synthetic Sequence
tctaaagctt

SEQ ID NO: 8478 - DNA, 10 bp, Artificial Sequence
  Synthetic Sequence
gagggtagcc

SEQ ID NO: 8479 - DNA, 10 bp, Artificial Sequence
  Synthetic Sequence
ccattcggaa

SEQ ID NO: 8480 - DNA, 10 bp, Artificial Sequence
  Synthetic Sequence
taccgctact

SEQ ID NO: 8481 - DNA, 10 bp, Artificial Sequence
  Synthetic Sequence
taactatctt

SEQ ID NO: 8482 - DNA, 10 bp, Artificial Sequence
  Synthetic Sequence
ttgccgcgga

SEQ ID NO: 8483 - DNA, 10 bp, Artificial Sequence
  Synthetic Sequence
gtacggaagt

SEQ ID NO: 8484 - DNA, 10 bp, Artificial Sequence
  Synthetic Sequence
catgagggaa

SEQ ID NO: 8485 - DNA, 10 bp, Artificial Sequence
  Synthetic Sequence
atctccagcg

SEQ ID NO: 8486 - DNA, 10 bp, Artificial Sequence
  Synthetic Sequence
gagtgttcgt

SEQ ID NO: 8487 - DNA, 10 bp, Artificial Sequence
  Synthetic Sequence
tctgaggtgt

SEQ ID NO: 8488 - DNA, 10 bp, Artificial Sequence
  Synthetic Sequence
tgctagcatt

SEQ ID NO: 8489 - DNA, 10 bp, Artificial Sequence
  Synthetic Sequence
tacgatacgc

SEQ ID NO: 8490 - DNA, 10 bp, Artificial Sequence
  Synthetic Sequence
agccagcaca

SEQ ID NO: 8491 - DNA, 10 bp, Artificial Sequence
  Synthetic Sequence
ccaggagctc

SEQ ID NO: 8492 - DNA, 10 bp, Artificial Sequence
  Synthetic Sequence
ttagatgata

SEQ ID NO: 8493 - DNA, 10 bp, Artificial Sequence
  Synthetic Sequence
ccctcctttc

SEQ ID NO: 8494 - DNA, 10 bp, Artificial Sequence
  Synthetic Sequence
aatcatgtag

SEQ ID NO: 8495 - DNA, 10 bp, Artificial Sequence
  Synthetic Sequence
tagcggtggg

SEQ ID NO: 8496 - DNA, 10 bp, Artificial Sequence
  Synthetic Sequence
tgttaccaga

SEQ ID NO: 8497 - DNA, 10 bp, Artificial Sequence
  Synthetic Sequence
caacgctcca

SEQ ID NO: 8498 - DNA, 10 bp, Artificial Sequence
  Synthetic Sequence
acgcatgcgt

SEQ ID NO: 8499 - DNA, 10 bp, Artificial Sequence
  Synthetic Sequence
acacaataca

SEQ ID NO: 8500 - DNA, 10 bp, Artificial Sequence
  Synthetic Sequence
ctttcttggg

SEQ ID NO: 8501 - DNA, 10 bp, Artificial Sequence
  Synthetic Sequence
gaggatgaac

SEQ ID NO: 8502 - DNA, 10 bp, Artificial Sequence
  Synthetic Sequence
ggccagagtg

SEQ ID NO: 8503 - DNA, 10 bp, Artificial Sequence
  Synthetic Sequence
ctgcagccag

SEQ ID NO: 8504 - DNA, 10 bp, Artificial Sequence
  Synthetic Sequence
cgaacgcact

SEQ ID NO: 8505 - DNA, 10 bp, Artificial Sequence
  Synthetic Sequence
tcatcgacgg

SEQ ID NO: 8506 - DNA, 10 bp, Artificial Sequence
  Synthetic Sequence
ctgcacatga

SEQ ID NO: 8507 - DNA, 10 bp, Artificial Sequence
  Synthetic Sequence
tcttacgatt

SEQ ID NO: 8508 - DNA, 10 bp, Artificial Sequence
  Synthetic Sequence
aatcacgggt

SEQ ID NO: 8509 - DNA, 10 bp, Artificial Sequence
  Synthetic Sequence
tccatccgga

SEQ ID NO: 8510 - DNA, 10 bp, Artificial Sequence
  Synthetic Sequence
gtagatagaa

SEQ ID NO: 8511 - DNA, 10 bp, Artificial Sequence
  Synthetic Sequence
ggcgctttcg

SEQ ID NO: 8512 - DNA, 10 bp, Artificial Sequence
  Synthetic Sequence
agggctccag

SEQ ID NO: 8513 - DNA, 10 bp, Artificial Sequence
  Synthetic Sequence
cttcgaaggc

SEQ ID NO: 8514 - DNA, 10 bp, Artificial Sequence
  Synthetic Sequence
ttaccacacg

SEQ ID NO: 8515 - DNA, 10 bp, Artificial Sequence
  Synthetic Sequence
atgggaatag

SEQ ID NO: 8516 - DNA, 10 bp, Artificial Sequence
  Synthetic Sequence
atttaaggcc

SEQ ID NO: 8517 - DNA, 10 bp, Artificial Sequence
  Synthetic Sequence
cgtgacccag

SEQ ID NO: 8518 - DNA, 10 bp, Artificial Sequence
  Synthetic Sequence
ctctacctag

SEQ ID NO: 8519 - DNA, 10 bp, Artificial Sequence
  Synthetic Sequence
ctcgtggtca

SEQ ID NO: 8520 - DNA, 10 bp, Artificial Sequence
  Synthetic Sequence
gggccatcag

SEQ ID NO: 8521 - DNA, 10 bp, Artificial Sequence
  Synthetic Sequence
cgcgatatag

SEQ ID NO: 8522 - DNA, 10 bp, Artificial Sequence
  Synthetic Sequence
aggtagcaac

SEQ ID NO: 8523 - DNA, 10 bp, Artificial Sequence
  Synthetic Sequence
gggcgtcttc

SEQ ID NO: 8524 - DNA, 10 bp, Artificial Sequence
  Synthetic Sequence
acgccatagg

SEQ ID NO: 8525 - DNA, 10 bp, Artificial Sequence
  Synthetic Sequence
acctgtcggc

SEQ ID NO: 8526 - DNA, 10 bp, Artificial Sequence
  Synthetic Sequence
agagccgtgt

SEQ ID NO: 8527 - DNA, 10 bp, Artificial Sequence
  Synthetic Sequence
tcgggtggaa

SEQ ID NO: 8528 - DNA, 10 bp, Artificial Sequence
  Synthetic Sequence
gtagagtgcc

SEQ ID NO: 8529 - DNA, 10 bp, Artificial Sequence
  Synthetic Sequence
gacctactgt

SEQ ID NO: 8530 - DNA, 10 bp, Artificial Sequence
  Synthetic Sequence
aatcctagct

SEQ ID NO: 8531 - DNA, 10 bp, Artificial Sequence
  Synthetic Sequence
tcttgtcgct

SEQ ID NO: 8532 - DNA, 10 bp, Artificial Sequence
  Synthetic Sequence
gaccaagccg

SEQ ID NO: 8533 - DNA, 10 bp, Artificial Sequence
  Synthetic Sequence
gcacacaagt

SEQ ID NO: 8534 - DNA, 10 bp, Artificial Sequence
  Synthetic Sequence
tttggccgcc

SEQ ID NO: 8535 - DNA, 10 bp, Artificial Sequence
  Synthetic Sequence
aatttcgata

SEQ ID NO: 8536 - DNA, 10 bp, Artificial Sequence
  Synthetic Sequence
gacgctaccg

SEQ ID NO: 8537 - DNA, 10 bp, Artificial Sequence
  Synthetic Sequence
tgtacccgta

SEQ ID NO: 8538 - DNA, 10 bp, Artificial Sequence
  Synthetic Sequence
gctcgcggtt

SEQ ID NO: 8539 - DNA, 10 bp, Artificial Sequence
  Synthetic Sequence
tgactagtcg

SEQ ID NO: 8540 - DNA, 10 bp, Artificial Sequence
  Synthetic Sequence
ggcggtaact

SEQ ID NO: 8541 - DNA, 10 bp, Artificial Sequence
  Synthetic Sequence
aggtttagct

SEQ ID NO: 8542 - DNA, 10 bp, Artificial Sequence
  Synthetic Sequence
ggctgacatt

SEQ ID NO: 8543 - DNA, 10 bp, Artificial Sequence
  Synthetic Sequence
gcttctgact

SEQ ID NO: 8544 - DNA, 10 bp, Artificial Sequence
  Synthetic Sequence
tgaactgaca

SEQ ID NO: 8545 - DNA, 10 bp, Artificial Sequence
  Synthetic Sequence
ccattgggtt

SEQ ID NO: 8546 - DNA, 10 bp, Artificial Sequence
  Synthetic Sequence
ttgatagatg

SEQ ID NO: 8547 - DNA, 10 bp, Artificial Sequence
  Synthetic Sequence
ctcctgctaa

SEQ ID NO: 8548 - DNA, 10 bp, Artificial Sequence
  Synthetic Sequence
gttacgagcg

SEQ ID NO: 8549 - DNA, 10 bp, Artificial Sequence
  Synthetic Sequence
atcaaaggaa

SEQ ID NO: 8550 - DNA, 10 bp, Artificial Sequence
  Synthetic Sequence
atcacggatt

SEQ ID NO: 8551 - DNA, 10 bp, Artificial Sequence
  Synthetic Sequence
tgctatttgg

SEQ ID NO: 8552 - DNA, 10 bp, Artificial Sequence
  Synthetic Sequence
tgtcatctag

SEQ ID NO: 8553 - DNA, 10 bp, Artificial Sequence
  Synthetic Sequence
aatatgcgaa

SEQ ID NO: 8554 - DNA, 10 bp, Artificial Sequence
  Synthetic Sequence
aataacgatc

SEQ ID NO: 8555 - DNA, 10 bp, Artificial Sequence
  Synthetic Sequence
caagcaccga

SEQ ID NO: 8556 - DNA, 10 bp, Artificial Sequence
  Synthetic Sequence
gaaatcgagt

SEQ ID NO: 8557 - DNA, 10 bp, Artificial Sequence
  Synthetic Sequence
aatttccaag

SEQ ID NO: 8558 - DNA, 10 bp, Artificial Sequence
  Synthetic Sequence
cgattacaac

SEQ ID NO: 8559 - DNA, 10 bp, Artificial Sequence
  Synthetic Sequence
aagtgcccga

SEQ ID NO: 8560 - DNA, 10 bp, Artificial Sequence
  Synthetic Sequence
acttcgtcaa

SEQ ID NO: 8561 - DNA, 10 bp, Artificial Sequence
  Synthetic Sequence
ctatgttctg

SEQ ID NO: 8562 - DNA, 10 bp, Artificial Sequence
  Synthetic Sequence
tgtagcccgt

SEQ ID NO: 8563 - DNA, 10 bp, Artificial Sequence
  Synthetic Sequence
ctgctggcac

SEQ ID NO: 8564 - DNA, 10 bp, Artificial Sequence
  Synthetic Sequence
ccggaataat

SEQ ID NO: 8565 - DNA, 10 bp, Artificial Sequence
  Synthetic Sequence
gactacgtgg

SEQ ID NO: 8566 - DNA, 10 bp, Artificial Sequence
  Synthetic Sequence
gagcctctct

SEQ ID NO: 8567 - DNA, 10 bp, Artificial Sequence
  Synthetic Sequence
cccaggagac

SEQ ID NO: 8568 - DNA, 10 bp, Artificial Sequence
  Synthetic Sequence
acgtagaagt

SEQ ID NO: 8569 - DNA, 10 bp, Artificial Sequence
  Synthetic Sequence
ggttcggagt

SEQ ID NO: 8570 - DNA, 10 bp, Artificial Sequence
  Synthetic Sequence
tcaatctcga

SEQ ID NO: 8571 - DNA, 10 bp, Artificial Sequence
  Synthetic Sequence
ggtcaccttt

SEQ ID NO: 8572 - DNA, 10 bp, Artificial Sequence
  Synthetic Sequence
ggtagtaacc

SEQ ID NO: 8573 - DNA, 10 bp, Artificial Sequence
  Synthetic Sequence
acgagtacaa

SEQ ID NO: 8574 - DNA, 10 bp, Artificial Sequence
  Synthetic Sequence
ccagaccgga

SEQ ID NO: 8575 - DNA, 10 bp, Artificial Sequence
  Synthetic Sequence
aaaggaccgc

SEQ ID NO: 8576 - DNA, 10 bp, Artificial Sequence
  Synthetic Sequence
ctccatgaga

SEQ ID NO: 8577 - DNA, 10 bp, Artificial Sequence
  Synthetic Sequence
attgctttgg

SEQ ID NO: 8578 - DNA, 10 bp, Artificial Sequence
  Synthetic Sequence
ccgacgccaa

SEQ ID NO: 8579 - DNA, 10 bp, Artificial Sequence
  Synthetic Sequence
ctgaggagcg

SEQ ID NO: 8580 - DNA, 10 bp, Artificial Sequence
  Synthetic Sequence
aggaaccgct

SEQ ID NO: 8581 - DNA, 10 bp, Artificial Sequence
  Synthetic Sequence
gggtatagtc

SEQ ID NO: 8582 - DNA, 10 bp, Artificial Sequence
  Synthetic Sequence
gcaatcttta

SEQ ID NO: 8583 - DNA, 10 bp, Artificial Sequence
  Synthetic Sequence
ggttacatct

SEQ ID NO: 8584 - DNA, 10 bp, Artificial Sequence
  Synthetic Sequence
caacacctac

SEQ ID NO: 8585 - DNA, 10 bp, Artificial Sequence
  Synthetic Sequence
cgctagtatc

SEQ ID NO: 8586 - DNA, 10 bp, Artificial Sequence
  Synthetic Sequence
tctaaacgaa

SEQ ID NO: 8587 - DNA, 10 bp, Artificial Sequence
  Synthetic Sequence
caagttatgt

SEQ ID NO: 8588 - DNA, 10 bp, Artificial Sequence
  Synthetic Sequence
aaaccatgct

SEQ ID NO: 8589 - DNA, 10 bp, Artificial Sequence
  Synthetic Sequence
tgtgattgat

SEQ ID NO: 8590 - DNA, 10 bp, Artificial Sequence
  Synthetic Sequence
aggtgctctt

SEQ ID NO: 8591 - DNA, 10 bp, Artificial Sequence
  Synthetic Sequence
aggatggtac

SEQ ID NO: 8592 - DNA, 10 bp, Artificial Sequence
  Synthetic Sequence
aatgcaccct

SEQ ID NO: 8593 - DNA, 10 bp, Artificial Sequence
  Synthetic Sequence
cggtctctac

SEQ ID NO: 8594 - DNA, 10 bp, Artificial Sequence
  Synthetic Sequence
ctcttaaagg

SEQ ID NO: 8595 - DNA, 10 bp, Artificial Sequence
  Synthetic Sequence
atagattcct

SEQ ID NO: 8596 - DNA, 10 bp, Artificial Sequence
  Synthetic Sequence
tccagttgta

SEQ ID NO: 8597 - DNA, 10 bp, Artificial Sequence
  Synthetic Sequence
gctttaatga

SEQ ID NO: 8598 - DNA, 10 bp, Artificial Sequence
  Synthetic Sequence
gctacagagc

SEQ ID NO: 8599 - DNA, 10 bp, Artificial Sequence
  Synthetic Sequence
gcgatgctgg

SEQ ID NO: 8600 - DNA, 10 bp, Artificial Sequence
  Synthetic Sequence
gagacgacct

SEQ ID NO: 8601 - DNA, 10 bp, Artificial Sequence
  Synthetic Sequence
ttggtagctt

SEQ ID NO: 8602 - DNA, 10 bp, Artificial Sequence
  Synthetic Sequence
tagcacgagt

SEQ ID NO: 8603 - DNA, 10 bp, Artificial Sequence
  Synthetic Sequence
ctcgtgagtg

SEQ ID NO: 8604 - DNA, 10 bp, Artificial Sequence
  Synthetic Sequence
catgaaatca

SEQ ID NO: 8605 - DNA, 10 bp, Artificial Sequence
  Synthetic Sequence
cgtgtttagc

SEQ ID NO: 8606 - DNA, 10 bp, Artificial Sequence
  Synthetic Sequence
aatttgacaa

SEQ ID NO: 8607 - DNA, 10 bp, Artificial Sequence
  Synthetic Sequence
tgaagaaatt

SEQ ID NO: 8608 - DNA, 10 bp, Artificial Sequence
  Synthetic Sequence
tctgcataag

SEQ ID NO: 8609 - DNA, 10 bp, Artificial Sequence
  Synthetic Sequence
tcgtcatatc

SEQ ID NO: 8610 - DNA, 10 bp, Artificial Sequence
  Synthetic Sequence
aacctaataa

SEQ ID NO: 8611 - DNA, 10 bp, Artificial Sequence
  Synthetic Sequence
agctcttggt

SEQ ID NO: 8612 - DNA, 10 bp, Artificial Sequence
  Synthetic Sequence
aacgctatgc

SEQ ID NO: 8613 - DNA, 10 bp, Artificial Sequence
  Synthetic Sequence
gtaaatcaac

SEQ ID NO: 8614 - DNA, 10 bp, Artificial Sequence
  Synthetic Sequence
ctgtggtggc

SEQ ID NO: 8615 - DNA, 10 bp, Artificial Sequence
  Synthetic Sequence
ttctgtttcg

SEQ ID NO: 8616 - DNA, 10 bp, Artificial Sequence
  Synthetic Sequence
ccacgcatac

SEQ ID NO: 8617 - DNA, 10 bp, Artificial Sequence
  Synthetic Sequence
atcgagacaa

SEQ ID NO: 8618 - DNA, 10 bp, Artificial Sequence
  Synthetic Sequence
tcaacgcacg

SEQ ID NO: 8619 - DNA, 10 bp, Artificial Sequence
  Synthetic Sequence
tacccagctg

SEQ ID NO: 8620 - DNA, 10 bp, Artificial Sequence
  Synthetic Sequence
actgttatat

SEQ ID NO: 8621 - DNA, 10 bp, Artificial Sequence
  Synthetic Sequence
ttgtgcacgt

SEQ ID NO: 8622 - DNA, 10 bp, Artificial Sequence
  Synthetic Sequence
gacgaatgga

SEQ ID NO: 8623 - DNA, 10 bp, Artificial Sequence
  Synthetic Sequence
agatcggaac

SEQ ID NO: 8624 - DNA, 10 bp, Artificial Sequence
  Synthetic Sequence
caaatcgaca

SEQ ID NO: 8625 - DNA, 10 bp, Artificial Sequence
  Synthetic Sequence
gcaacgcaga

SEQ ID NO: 8626 - DNA, 10 bp, Artificial Sequence
  Synthetic Sequence
gtctacaata

SEQ ID NO: 8627 - DNA, 10 bp, Artificial Sequence
  Synthetic Sequence
tagatgcttg

SEQ ID NO: 8628 - DNA, 10 bp, Artificial Sequence
  Synthetic Sequence
aaagaatggg

SEQ ID NO: 8629 - DNA, 10 bp, Artificial Sequence
  Synthetic Sequence
taaagcatag

SEQ ID NO: 8630 - DNA, 10 bp, Artificial Sequence
  Synthetic Sequence
ggcgaataag

SEQ ID NO: 8631 - DNA, 10 bp, Artificial Sequence
  Synthetic Sequence
ggacgggctt

SEQ ID NO: 8632 - DNA, 10 bp, Artificial Sequence
  Synthetic Sequence
cagcccggtt

SEQ ID NO: 8633 - DNA, 10 bp, Artificial Sequence
  Synthetic Sequence
gtgaagtgct

SEQ ID NO: 8634 - DNA, 10 bp, Artificial Sequence
  Synthetic Sequence
tcaatcatgg

SEQ ID NO: 8635 - DNA, 10 bp, Artificial Sequence
  Synthetic Sequence
taattaatgt

SEQ ID NO: 8636 - DNA, 10 bp, Artificial Sequence
  Synthetic Sequence
gtgaacaagc

SEQ ID NO: 8637 - DNA, 10 bp, Artificial Sequence
  Synthetic Sequence
ctggagctca

SEQ ID NO: 8638 - DNA, 10 bp, Artificial Sequence
  Synthetic Sequence
taccctgtac

SEQ ID NO: 8639 - DNA, 10 bp, Artificial Sequence
  Synthetic Sequence
ggtctactag

SEQ ID NO: 8640 - DNA, 10 bp, Artificial Sequence
  Synthetic Sequence
tgctaccggg

SEQ ID NO: 8641 - DNA, 10 bp, Artificial Sequence
  Synthetic Sequence
cacgcactaa

SEQ ID NO: 8642 - DNA, 10 bp, Artificial Sequence
  Synthetic Sequence
cgtatcaact

SEQ ID NO: 8643 - DNA, 10 bp, Artificial Sequence
  Synthetic Sequence
cagtctgagg

SEQ ID NO: 8644 - DNA, 10 bp, Artificial Sequence
  Synthetic Sequence
gcacgacaaa

SEQ ID NO: 8645 - DNA, 10 bp, Artificial Sequence
  Synthetic Sequence
gtccgtggtg

SEQ ID NO: 8646 - DNA, 10 bp, Artificial Sequence
  Synthetic Sequence
ctcactcttt

SEQ ID NO: 8647 - DNA, 10 bp, Artificial Sequence
  Synthetic Sequence
taaccctccg

SEQ ID NO: 8648 - DNA, 10 bp, Artificial Sequence
  Synthetic Sequence
aaagattcaa

SEQ ID NO: 8649 - DNA, 10 bp, Artificial Sequence
  Synthetic Sequence
aggttagcgt

SEQ ID NO: 8650 - DNA, 10 bp, Artificial Sequence
  Synthetic Sequence
acaaggatga

SEQ ID NO: 8651 - DNA, 10 bp, Artificial Sequence
  Synthetic Sequence
ggtcacgaca

SEQ ID NO: 8652 - DNA, 10 bp, Artificial Sequence
  Synthetic Sequence
ttattggctg

SEQ ID NO: 8653 - DNA, 10 bp, Artificial Sequence
  Synthetic Sequence
atagccgtaa

SEQ ID NO: 8654 - DNA, 10 bp, Artificial Sequence
  Synthetic Sequence
gggcgtttat

SEQ ID NO: 8655 - DNA, 10 bp, Artificial Sequence
  Synthetic Sequence
tactcataaa

SEQ ID NO: 8656 - DNA, 10 bp, Artificial Sequence
  Synthetic Sequence
ctgtcctgac

SEQ ID NO: 8657 - DNA, 10 bp, Artificial Sequence
  Synthetic Sequence
tttgctgacg

SEQ ID NO: 8658 - DNA, 10 bp, Artificial Sequence
  Synthetic Sequence
cccttgcatt

SEQ ID NO: 8659 - DNA, 10 bp, Artificial Sequence
  Synthetic Sequence
agggtctcac

SEQ ID NO: 8660 - DNA, 10 bp, Artificial Sequence
  Synthetic Sequence
attccgcctt

SEQ ID NO: 8661 - DNA, 10 bp, Artificial Sequence
  Synthetic Sequence
gtagggatcg

SEQ ID NO: 8662 - DNA, 10 bp, Artificial Sequence
  Synthetic Sequence
tgacgaaggg

SEQ ID NO: 8663 - DNA, 10 bp, Artificial Sequence
  Synthetic Sequence
gcatcactcc

SEQ ID NO: 8664 - DNA, 10 bp, Artificial Sequence
  Synthetic Sequence
cacgcaacgc

SEQ ID NO: 8665 - DNA, 10 bp, Artificial Sequence
  Synthetic Sequence
cactctacta

SEQ ID NO: 8666 - DNA, 10 bp, Artificial Sequence
  Synthetic Sequence
cacgccgcaa

SEQ ID NO: 8667 - DNA, 10 bp, Artificial Sequence
  Synthetic Sequence
gagagggaat

SEQ ID NO: 8668 - DNA, 10 bp, Artificial Sequence
  Synthetic Sequence
cagagtcgcg

SEQ ID NO: 8669 - DNA, 10 bp, Artificial Sequence
  Synthetic Sequence
gcaccaataa

SEQ ID NO: 8670 - DNA, 10 bp, Artificial Sequence
  Synthetic Sequence
ctaccagact

SEQ ID NO: 8671 - DNA, 10 bp, Artificial Sequence
  Synthetic Sequence
ggctgatgca

SEQ ID NO: 8672 - DNA, 10 bp, Artificial Sequence
  Synthetic Sequence
cgcactgatg

SEQ ID NO: 8673 - DNA, 10 bp, Artificial Sequence
  Synthetic Sequence
catttctttg

SEQ ID NO: 8674 - DNA, 10 bp, Artificial Sequence
  Synthetic Sequence
tgaagaacgc

SEQ ID NO: 8675 - DNA, 10 bp, Artificial Sequence
  Synthetic Sequence
caatccctct

SEQ ID NO: 8676 - DNA, 10 bp, Artificial Sequence
  Synthetic Sequence
ccgacgatcg

SEQ ID NO: 8677 - DNA, 10 bp, Artificial Sequence
  Synthetic Sequence
cctggacatt

SEQ ID NO: 8678 - DNA, 10 bp, Artificial Sequence
  Synthetic Sequence
gccgcccaat

SEQ ID NO: 8679 - DNA, 10 bp, Artificial Sequence
  Synthetic Sequence
tctgccacgc

SEQ ID NO: 8680 - DNA, 10 bp, Artificial Sequence
  Synthetic Sequence
gccctgaaca

SEQ ID NO: 8681 - DNA, 10 bp, Artificial Sequence
  Synthetic Sequence
cggccacttg

SEQ ID NO: 8682 - DNA, 10 bp, Artificial Sequence
  Synthetic Sequence
tggagtctcg

SEQ ID NO: 8683 - DNA, 10 bp, Artificial Sequence
  Synthetic Sequence
ggttacaatc

SEQ ID NO: 8684 - DNA, 10 bp, Artificial Sequence
  Synthetic Sequence
atggagagga

SEQ ID NO: 8685 - DNA, 10 bp, Artificial Sequence
  Synthetic Sequence
tccttgatga

SEQ ID NO: 8686 - DNA, 10 bp, Artificial Sequence
  Synthetic Sequence
tttacgtact

SEQ ID NO: 8687 - DNA, 10 bp, Artificial Sequence
  Synthetic Sequence
ccctccagtt

SEQ ID NO: 8688 - DNA, 10 bp, Artificial Sequence
  Synthetic Sequence
ctcgcctggt

SEQ ID NO: 8689 - DNA, 10 bp, Artificial Sequence
  Synthetic Sequence
agtggtccac

SEQ ID NO: 8690 - DNA, 10 bp, Artificial Sequence
  Synthetic Sequence
gactcagatt

SEQ ID NO: 8691 - DNA, 10 bp, Artificial Sequence
  Synthetic Sequence
gtctgttagt

SEQ ID NO: 8692 - DNA, 10 bp, Artificial Sequence
  Synthetic Sequence
cacacttccc

SEQ ID NO: 8693 - DNA, 10 bp, Artificial Sequence
  Synthetic Sequence
gcctgagtgg

SEQ ID NO: 8694 - DNA, 10 bp, Artificial Sequence
  Synthetic Sequence
aggcatttcc

SEQ ID NO: 8695 - DNA, 10 bp, Artificial Sequence
  Synthetic Sequence
tggtgggcca

SEQ ID NO: 8696 - DNA, 10 bp, Artificial Sequence
  Synthetic Sequence
tagcacatac

SEQ ID NO: 8697 - DNA, 10 bp, Artificial Sequence
  Synthetic Sequence
acaactctgt

SEQ ID NO: 8698 - DNA, 10 bp, Artificial Sequence
  Synthetic Sequence
aagcgtcggg

SEQ ID NO: 8699 - DNA, 10 bp, Artificial Sequence
  Synthetic Sequence
ttagagattt

SEQ ID NO: 8700 - DNA, 10 bp, Artificial Sequence
  Synthetic Sequence
tattacctca

SEQ ID NO: 8701 - DNA, 10 bp, Artificial Sequence
  Synthetic Sequence
tgaggcgcca

SEQ ID NO: 8702 - DNA, 10 bp, Artificial Sequence
  Synthetic Sequence
gttgagaatc

SEQ ID NO: 8703 - DNA, 10 bp, Artificial Sequence
  Synthetic Sequence
acggcggaga

SEQ ID NO: 8704 - DNA, 10 bp, Artificial Sequence
  Synthetic Sequence
ttagacacta

SEQ ID NO: 8705 - DNA, 10 bp, Artificial Sequence
  Synthetic Sequence
agccaagtgg

SEQ ID NO: 8706 - DNA, 10 bp, Artificial Sequence
  Synthetic Sequence
tctactgcac

SEQ ID NO: 8707 - DNA, 10 bp, Artificial Sequence
  Synthetic Sequence
gccgggtaat

SEQ ID NO: 8708 - DNA, 10 bp, Artificial Sequence
  Synthetic Sequence
agcgctctat

SEQ ID NO: 8709 - DNA, 10 bp, Artificial Sequence
  Synthetic Sequence
tatatatttg

SEQ ID NO: 8710 - DNA, 10 bp, Artificial Sequence
  Synthetic Sequence
gatggtcccg

SEQ ID NO: 8711 - DNA, 10 bp, Artificial Sequence
  Synthetic Sequence
gatcgttgcc

SEQ ID NO: 8712 - DNA, 10 bp, Artificial Sequence
  Synthetic Sequence
gggccaacgt

SEQ ID NO: 8713 - DNA, 10 bp, Artificial Sequence
  Synthetic Sequence
agatcgtgaa

SEQ ID NO: 8714 - DNA, 10 bp, Artificial Sequence
  Synthetic Sequence
ggagtactcg

SEQ ID NO: 8715 - DNA, 10 bp, Artificial Sequence
  Synthetic Sequence
ataacagccg

SEQ ID NO: 8716 - DNA, 10 bp, Artificial Sequence
  Synthetic Sequence
gccctaagtg

SEQ ID NO: 8717 - DNA, 10 bp, Artificial Sequence
  Synthetic Sequence
taaatgtatt

SEQ ID NO: 8718 - DNA, 10 bp, Artificial Sequence
  Synthetic Sequence
aaagaccgca

SEQ ID NO: 8719 - DNA, 10 bp, Artificial Sequence
  Synthetic Sequence
aacatctcaa

SEQ ID NO: 8720 - DNA, 10 bp, Artificial Sequence
  Synthetic Sequence
taaattgtgg

SEQ ID NO: 8721 - DNA, 10 bp, Artificial Sequence
  Synthetic Sequence
gtgcacatcc

SEQ ID NO: 8722 - DNA, 10 bp, Artificial Sequence
  Synthetic Sequence
acttcgctcg

SEQ ID NO: 8723 - DNA, 10 bp, Artificial Sequence
  Synthetic Sequence
gactgaacgc

SEQ ID NO: 8724 - DNA, 10 bp, Artificial Sequence
  Synthetic Sequence
gccatgggtc

SEQ ID NO: 8725 - DNA, 10 bp, Artificial Sequence
  Synthetic Sequence
cacctcgcga

SEQ ID NO: 8726 - DNA, 10 bp, Artificial Sequence
  Synthetic Sequence
atttcttatg

SEQ ID NO: 8727 - DNA, 10 bp, Artificial Sequence
  Synthetic Sequence
gttggtgcat

SEQ ID NO: 8728 - DNA, 10 bp, Artificial Sequence
  Synthetic Sequence
gagaccgctg

SEQ ID NO: 8729 - DNA, 10 bp, Artificial Sequence
  Synthetic Sequence
atagactgta

SEQ ID NO: 8730 - DNA, 10 bp, Artificial Sequence
  Synthetic Sequence
gcacctgctt

SEQ ID NO: 8731 - DNA, 10 bp, Artificial Sequence
  Synthetic Sequence
gctggtacgg

SEQ ID NO: 8732 - DNA, 10 bp, Artificial Sequence
  Synthetic Sequence
ctggccctag

SEQ ID NO: 8733 - DNA, 10 bp, Artificial Sequence
  Synthetic Sequence
gtacatggtc

SEQ ID NO: 8734 - DNA, 10 bp, Artificial Sequence
  Synthetic Sequence
cgttgccaat

SEQ ID NO: 8735 - DNA, 10 bp, Artificial Sequence
  Synthetic Sequence
cttacctacg

SEQ ID NO: 8736 - DNA, 10 bp, Artificial Sequence
  Synthetic Sequence
tagggcggat

SEQ ID NO: 8737 - DNA, 10 bp, Artificial Sequence
  Synthetic Sequence
ctccagtgcg

SEQ ID NO: 8738 - DNA, 10 bp, Artificial Sequence
  Synthetic Sequence
gccgtattca

SEQ ID NO: 8739 - DNA, 10 bp, Artificial Sequence
  Synthetic Sequence
acgtaaaccc

SEQ ID NO: 8740 - DNA, 10 bp, Artificial Sequence
  Synthetic Sequence
acagaatgac

SEQ ID NO: 8741 - DNA, 10 bp, Artificial Sequence
  Synthetic Sequence
gtgacctact

SEQ ID NO: 8742 - DNA, 10 bp, Artificial Sequence
  Synthetic Sequence
aagatagttg

SEQ ID NO: 8743 - DNA, 10 bp, Artificial Sequence
  Synthetic Sequence
ttgaatacgt

SEQ ID NO: 8744 - DNA, 10 bp, Artificial Sequence
  Synthetic Sequence
gattggaggt

SEQ ID NO: 8745 - DNA, 10 bp, Artificial Sequence
  Synthetic Sequence
taaacgttag

SEQ ID NO: 8746 - DNA, 10 bp, Artificial Sequence
  Synthetic Sequence
tcgctctaac

SEQ ID NO: 8747 - DNA, 10 bp, Artificial Sequence
  Synthetic Sequence
gtattgtcta

SEQ ID NO: 8748 - DNA, 10 bp, Artificial Sequence
  Synthetic Sequence
agtgagtacc

SEQ ID NO: 8749 - DNA, 10 bp, Artificial Sequence
  Synthetic Sequence
aacgaataaa

SEQ ID NO: 8750 - DNA, 10 bp, Artificial Sequence
  Synthetic Sequence
cagagacggc

SEQ ID NO: 8751 - DNA, 10 bp, Artificial Sequence
  Synthetic Sequence
gctagtagta

SEQ ID NO: 8752 - DNA, 10 bp, Artificial Sequence
  Synthetic Sequence
ttcaggtgtt

SEQ ID NO: 8753 - DNA, 10 bp, Artificial Sequence
  Synthetic Sequence
agccaaccag

SEQ ID NO: 8754 - DNA, 10 bp, Artificial Sequence
  Synthetic Sequence
cgtaactgcg

SEQ ID NO: 8755 - DNA, 10 bp, Artificial Sequence
  Synthetic Sequence
tcgcaggacg

SEQ ID NO: 8756 - DNA, 10 bp, Artificial Sequence
  Synthetic Sequence
cttagaggcc

SEQ ID NO: 8757 - DNA, 10 bp, Artificial Sequence
  Synthetic Sequence
gaagcaatag

SEQ ID NO: 8758 - DNA, 10 bp, Artificial Sequence
  Synthetic Sequence
actacgtcgg

SEQ ID NO: 8759 - DNA, 10 bp, Artificial Sequence
  Synthetic Sequence
acacgtcaga

SEQ ID NO: 8760 - DNA, 10 bp, Artificial Sequence
  Synthetic Sequence
cacgataaca

SEQ ID NO: 8761 - DNA, 10 bp, Artificial Sequence
  Synthetic Sequence
tatcaaagat

SEQ ID NO: 8762 - DNA, 10 bp, Artificial Sequence
  Synthetic Sequence
cagccctaat

SEQ ID NO: 8763 - DNA, 10 bp, Artificial Sequence
  Synthetic Sequence
ccgtatcgga

SEQ ID NO: 8764 - DNA, 10 bp, Artificial Sequence
  Synthetic Sequence
ccgcctatca

SEQ ID NO: 8765 - DNA, 10 bp, Artificial Sequence
  Synthetic Sequence
ggcaattcgt

SEQ ID NO: 8766 - DNA, 10 bp, Artificial Sequence
  Synthetic Sequence
tgtctctcag

SEQ ID NO: 8767 - DNA, 10 bp, Artificial Sequence
  Synthetic Sequence
tagactgtca

SEQ ID NO: 8768 - DNA, 10 bp, Artificial Sequence
  Synthetic Sequence
cgagtatcta

SEQ ID NO: 8769 - DNA, 10 bp, Artificial Sequence
  Synthetic Sequence
cgcatctcca

SEQ ID NO: 8770 - DNA, 10 bp, Artificial Sequence
  Synthetic Sequence
ctgtacaggc

SEQ ID NO: 8771 - DNA, 10 bp, Artificial Sequence
  Synthetic Sequence
aaacctacag

SEQ ID NO: 8772 - DNA, 10 bp, Artificial Sequence
  Synthetic Sequence
ttgatgtctt

SEQ ID NO: 8773 - DNA, 10 bp, Artificial Sequence
  Synthetic Sequence
tagcggcgaa

SEQ ID NO: 8774 - DNA, 10 bp, Artificial Sequence
  Synthetic Sequence
cgagccataa

SEQ ID NO: 8775 - DNA, 10 bp, Artificial Sequence
  Synthetic Sequence
ccacgattct

SEQ ID NO: 8776 - DNA, 10 bp, Artificial Sequence
  Synthetic Sequence
cgtcggatgt

SEQ ID NO: 8777 - DNA, 10 bp, Artificial Sequence
  Synthetic Sequence
ccgggtacca

SEQ ID NO: 8778 - DNA, 10 bp, Artificial Sequence
  Synthetic Sequence
ctgggagtca

SEQ ID NO: 8779 - DNA, 10 bp, Artificial Sequence
  Synthetic Sequence
tcagcacttc

SEQ ID NO: 8780 - DNA, 10 bp, Artificial Sequence
  Synthetic Sequence
tgccctcgat

SEQ ID NO: 8781 - DNA, 10 bp, Artificial Sequence
  Synthetic Sequence
gtgagagccg

SEQ ID NO: 8782 - DNA, 10 bp, Artificial Sequence
  Synthetic Sequence
gtggacctaa

SEQ ID NO: 8783 - DNA, 10 bp, Artificial Sequence
  Synthetic Sequence
acgtgggcac

SEQ ID NO: 8784 - DNA, 10 bp, Artificial Sequence
  Synthetic Sequence
acccaaatgc

SEQ ID NO: 8785 - DNA, 10 bp, Artificial Sequence
  Synthetic Sequence
ccgtacatca

SEQ ID NO: 8786 - DNA, 10 bp, Artificial Sequence
  Synthetic Sequence
ggaagatgtg

SEQ ID NO: 8787 - DNA, 10 bp, Artificial Sequence
  Synthetic Sequence
aggccattca

SEQ ID NO: 8788 - DNA, 10 bp, Artificial Sequence
  Synthetic Sequence
cgatacagaa

SEQ ID NO: 8789 - DNA, 10 bp, Artificial Sequence
  Synthetic Sequence
ggatatatgt

SEQ ID NO: 8790 - DNA, 10 bp, Artificial Sequence
  Synthetic Sequence
gttgcaatta

SEQ ID NO: 8791 - DNA, 10 bp, Artificial Sequence
  Synthetic Sequence
tacaattcaa

SEQ ID NO: 8792 - DNA, 10 bp, Artificial Sequence
  Synthetic Sequence
acatgtttga

SEQ ID NO: 8793 - DNA, 10 bp, Artificial Sequence
  Synthetic Sequence
cacgcgagat

SEQ ID NO: 8794 - DNA, 10 bp, Artificial Sequence
  Synthetic Sequence
tgctttgccc

SEQ ID NO: 8795 - DNA, 10 bp, Artificial Sequence
  Synthetic Sequence
agaaatctta

SEQ ID NO: 8796 - DNA, 10 bp, Artificial Sequence
  Synthetic Sequence
ggcatagtcg

SEQ ID NO: 8797 - DNA, 10 bp, Artificial Sequence
  Synthetic Sequence
gtagtttaca

SEQ ID NO: 8798 - DNA, 10 bp, Artificial Sequence
  Synthetic Sequence
aacagaaaga

SEQ ID NO: 8799 - DNA, 10 bp, Artificial Sequence
  Synthetic Sequence
tggtgggtgt

SEQ ID NO: 8800 - DNA, 10 bp, Artificial Sequence
  Synthetic Sequence
catcgttctt

SEQ ID NO: 8801 - DNA, 10 bp, Artificial Sequence
  Synthetic Sequence
aaagatactg

SEQ ID NO: 8802 - DNA, 10 bp, Artificial Sequence
  Synthetic Sequence
actcggactg

SEQ ID NO: 8803 - DNA, 10 bp, Artificial Sequence
  Synthetic Sequence
aatcaatcgg

SEQ ID NO: 8804 - DNA, 10 bp, Artificial Sequence
  Synthetic Sequence
gctgggtagc

SEQ ID NO: 8805 - DNA, 10 bp, Artificial Sequence
  Synthetic Sequence
agtaagccgc

SEQ ID NO: 8806 - DNA, 10 bp, Artificial Sequence
  Synthetic Sequence
ccaacgctcc

SEQ ID NO: 8807 - DNA, 10 bp, Artificial Sequence
  Synthetic Sequence
atccgattct

SEQ ID NO: 8808 - DNA, 10 bp, Artificial Sequence
  Synthetic Sequence
gttacgtttg

SEQ ID NO: 8809 - DNA, 10 bp, Artificial Sequence
  Synthetic Sequence
ggctctggac

SEQ ID NO: 8810 - DNA, 10 bp, Artificial Sequence
  Synthetic Sequence
ggccagtgac

SEQ ID NO: 8811 - DNA, 10 bp, Artificial Sequence
  Synthetic Sequence
ctaatatagc

SEQ ID NO: 8812 - DNA, 10 bp, Artificial Sequence
  Synthetic Sequence
ccatgttggt

SEQ ID NO: 8813 - DNA, 10 bp, Artificial Sequence
  Synthetic Sequence
agcaagcagg

SEQ ID NO: 8814 - DNA, 10 bp, Artificial Sequence
  Synthetic Sequence
tgcgatccag

SEQ ID NO: 8815 - DNA, 10 bp, Artificial Sequence
  Synthetic Sequence
catgccgtcg

SEQ ID NO: 8816 - DNA, 10 bp, Artificial Sequence
  Synthetic Sequence
tagacccaaa

SEQ ID NO: 8817 - DNA, 10 bp, Artificial Sequence
  Synthetic Sequence
tcgctcctcg

SEQ ID NO: 8818 - DNA, 10 bp, Artificial Sequence
  Synthetic Sequence
cagaagccac

SEQ ID NO: 8819 - DNA, 10 bp, Artificial Sequence
  Synthetic Sequence
ggtgcgtgaa

SEQ ID NO: 8820 - DNA, 10 bp, Artificial Sequence
  Synthetic Sequence
tgtccgcagt

SEQ ID NO: 8821 - DNA, 10 bp, Artificial Sequence
  Synthetic Sequence
acggtgcact

SEQ ID NO: 8822 - DNA, 10 bp, Artificial Sequence
  Synthetic Sequence
cagtcctata

SEQ ID NO: 8823 - DNA, 10 bp, Artificial Sequence
  Synthetic Sequence
ccagatgcaa

SEQ ID NO: 8824 - DNA, 10 bp, Artificial Sequence
  Synthetic Sequence
tctttgagtg

SEQ ID NO: 8825 - DNA, 10 bp, Artificial Sequence
  Synthetic Sequence
ggaagtgctc

SEQ ID NO: 8826 - DNA, 10 bp, Artificial Sequence
  Synthetic Sequence
ctatatgtgc

SEQ ID NO: 8827 - DNA, 10 bp, Artificial Sequence
  Synthetic Sequence
aactgggaca

SEQ ID NO: 8828 - DNA, 10 bp, Artificial Sequence
  Synthetic Sequence
tcgaacccga

SEQ ID NO: 8829 - DNA, 10 bp, Artificial Sequence
  Synthetic Sequence
tgggctcatg

SEQ ID NO: 8830 - DNA, 10 bp, Artificial Sequence
  Synthetic Sequence
tacgcagaac

SEQ ID NO: 8831 - DNA, 10 bp, Artificial Sequence
  Synthetic Sequence
gacacatcgg

SEQ ID NO: 8832 - DNA, 10 bp, Artificial Sequence
  Synthetic Sequence
caccaatagg

SEQ ID NO: 8833 - DNA, 10 bp, Artificial Sequence
  Synthetic Sequence
aacaccctgg

SEQ ID NO: 8834 - DNA, 10 bp, Artificial Sequence
  Synthetic Sequence
aaaggtttag

SEQ ID NO: 8835 - DNA, 10 bp, Artificial Sequence
  Synthetic Sequence
tgatcagtgc

SEQ ID NO: 8836 - DNA, 10 bp, Artificial Sequence
  Synthetic Sequence
tgcaccgagc

SEQ ID NO: 8837 - DNA, 10 bp, Artificial Sequence
  Synthetic Sequence
tacaagacga

SEQ ID NO: 8838 - DNA, 10 bp, Artificial Sequence
  Synthetic Sequence
aatggcggga

SEQ ID NO: 8839 - DNA, 10 bp, Artificial Sequence
  Synthetic Sequence
atcgtctcca

SEQ ID NO: 8840 - DNA, 10 bp, Artificial Sequence
  Synthetic Sequence
tatcgcaaac

SEQ ID NO: 8841 - DNA, 10 bp, Artificial Sequence
  Synthetic Sequence
cacgcagatg

SEQ ID NO: 8842 - DNA, 10 bp, Artificial Sequence
  Synthetic Sequence
gggagtgtac

SEQ ID NO: 8843 - DNA, 10 bp, Artificial Sequence
  Synthetic Sequence
acgcgacgta

SEQ ID NO: 8844 - DNA, 10 bp, Artificial Sequence
  Synthetic Sequence
gtggtggata

SEQ ID NO: 8845 - DNA, 10 bp, Artificial Sequence
  Synthetic Sequence
ctactaatct

SEQ ID NO: 8846 - DNA, 10 bp, Artificial Sequence
  Synthetic Sequence
ataacgatgg

SEQ ID NO: 8847 - DNA, 10 bp, Artificial Sequence
  Synthetic Sequence
ttgtccatac

SEQ ID NO: 8848 - DNA, 10 bp, Artificial Sequence
  Synthetic Sequence
attcccatac

SEQ ID NO: 8849 - DNA, 10 bp, Artificial Sequence
  Synthetic Sequence
catcaagtat

SEQ ID NO: 8850 - DNA, 10 bp, Artificial Sequence
  Synthetic Sequence
aaacgctgaa

SEQ ID NO: 8851 - DNA, 10 bp, Artificial Sequence
  Synthetic Sequence
gtaacgcggg

SEQ ID NO: 8852 - DNA, 10 bp, Artificial Sequence
  Synthetic Sequence
tagggcgtcc

SEQ ID NO: 8853 - DNA, 10 bp, Artificial Sequence
  Synthetic Sequence
gtgtctaagt

SEQ ID NO: 8854 - DNA, 10 bp, Artificial Sequence
  Synthetic Sequence
gctgttcgcg

SEQ ID NO: 8855 - DNA, 10 bp, Artificial Sequence
  Synthetic Sequence
caagccgctg

SEQ ID NO: 8856 - DNA, 10 bp, Artificial Sequence
  Synthetic Sequence
gagacaggat

SEQ ID NO: 8857 - DNA, 10 bp, Artificial Sequence
  Synthetic Sequence
ttaacgggac

SEQ ID NO: 8858 - DNA, 10 bp, Artificial Sequence
  Synthetic Sequence
cgccgaaact

SEQ ID NO: 8859 - DNA, 10 bp, Artificial Sequence
  Synthetic Sequence
ttcgtagaag

SEQ ID NO: 8860 - DNA, 10 bp, Artificial Sequence
  Synthetic Sequence
catttcgtca

SEQ ID NO: 8861 - DNA, 10 bp, Artificial Sequence
  Synthetic Sequence
agcgatgaaa

SEQ ID NO: 8862 - DNA, 10 bp, Artificial Sequence
  Synthetic Sequence
ccctttgcga

SEQ ID NO: 8863 - DNA, 10 bp, Artificial Sequence
  Synthetic Sequence
gtgcaccgac

SEQ ID NO: 8864 - DNA, 10 bp, Artificial Sequence
  Synthetic Sequence
gtcttgagga

SEQ ID NO: 8865 - DNA, 10 bp, Artificial Sequence
  Synthetic Sequence
acttccgcca

SEQ ID NO: 8866 - DNA, 10 bp, Artificial Sequence
  Synthetic Sequence
cgcgtccaag

SEQ ID NO: 8867 - DNA, 10 bp, Artificial Sequence
  Synthetic Sequence
ggctctacca

SEQ ID NO: 8868 - DNA, 10 bp, Artificial Sequence
  Synthetic Sequence
tagctgagcg

SEQ ID NO: 8869 - DNA, 10 bp, Artificial Sequence
  Synthetic Sequence
gtctatggat

SEQ ID NO: 8870 - DNA, 10 bp, Artificial Sequence
  Synthetic Sequence
ctccttgtac

SEQ ID NO: 8871 - DNA, 10 bp, Artificial Sequence
  Synthetic Sequence
tgcgcgctac

SEQ ID NO: 8872 - DNA, 10 bp, Artificial Sequence
  Synthetic Sequence
tgtccgcgaa

SEQ ID NO: 8873 - DNA, 10 bp, Artificial Sequence
  Synthetic Sequence
cagtttattc

SEQ ID NO: 8874 - DNA, 10 bp, Artificial Sequence
  Synthetic Sequence
cctattcatc

SEQ ID NO: 8875 - DNA, 10 bp, Artificial Sequence
  Synthetic Sequence
gagttatgct

SEQ ID NO: 8876 - DNA, 10 bp, Artificial Sequence
  Synthetic Sequence
ggactgccct

SEQ ID NO: 8877 - DNA, 10 bp, Artificial Sequence
  Synthetic Sequence
ggtaaagcct

SEQ ID NO: 8878 - DNA, 10 bp, Artificial Sequence
  Synthetic Sequence
aacaccatta

SEQ ID NO: 8879 - DNA, 10 bp, Artificial Sequence
  Synthetic Sequence
attactcata

SEQ ID NO: 8880 - DNA, 10 bp, Artificial Sequence
  Synthetic Sequence
ggaaataaca

SEQ ID NO: 8881 - DNA, 10 bp, Artificial Sequence
  Synthetic Sequence
ataccttcta

SEQ ID NO: 8882 - DNA, 10 bp, Artificial Sequence
  Synthetic Sequence
cggtcgtaac

SEQ ID NO: 8883 - DNA, 10 bp, Artificial Sequence
  Synthetic Sequence
gaggtctcgc

SEQ ID NO: 8884 - DNA, 10 bp, Artificial Sequence
  Synthetic Sequence
aacatgtctt

SEQ ID NO: 8885 - DNA, 10 bp, Artificial Sequence
  Synthetic Sequence
tctaaatttc

SEQ ID NO: 8886 - DNA, 10 bp, Artificial Sequence
  Synthetic Sequence
tgctacttct

SEQ ID NO: 8887 - DNA, 10 bp, Artificial Sequence
  Synthetic Sequence
gtctaatggg

SEQ ID NO: 8888 - DNA, 10 bp, Artificial Sequence
  Synthetic Sequence
tgtatgctgt

SEQ ID NO: 8889 - DNA, 10 bp, Artificial Sequence
  Synthetic Sequence
cagcgcagat

SEQ ID NO: 8890 - DNA, 10 bp, Artificial Sequence
  Synthetic Sequence
actctcagaa

SEQ ID NO: 8891 - DNA, 10 bp, Artificial Sequence
  Synthetic Sequence
agaggaccag

SEQ ID NO: 8892 - DNA, 10 bp, Artificial Sequence
  Synthetic Sequence
aatggacaaa

SEQ ID NO: 8893 - DNA, 10 bp, Artificial Sequence
  Synthetic Sequence
ccttgagcgc

SEQ ID NO: 8894 - DNA, 10 bp, Artificial Sequence
  Synthetic Sequence
acccgtcgag

SEQ ID NO: 8895 - DNA, 10 bp, Artificial Sequence
  Synthetic Sequence
tagtatgtgg

SEQ ID NO: 8896 - DNA, 10 bp, Artificial Sequence
  Synthetic Sequence
ggtgcgattg

SEQ ID NO: 8897 - DNA, 10 bp, Artificial Sequence
  Synthetic Sequence
tttgcagtaa

SEQ ID NO: 8898 - DNA, 10 bp, Artificial Sequence
  Synthetic Sequence
gccgtaacgg

SEQ ID NO: 8899 - DNA, 10 bp, Artificial Sequence
  Synthetic Sequence
ataatataaa

SEQ ID NO: 8900 - DNA, 10 bp, Artificial Sequence
  Synthetic Sequence
cgaccaaggt

SEQ ID NO: 8901 - DNA, 10 bp, Artificial Sequence
  Synthetic Sequence
tcatattctc

SEQ ID NO: 8902 - DNA, 10 bp, Artificial Sequence
  Synthetic Sequence
tcatgtcaag

SEQ ID NO: 8903 - DNA, 10 bp, Artificial Sequence
  Synthetic Sequence
tggaatgatg

SEQ ID NO: 8904 - DNA, 10 bp, Artificial Sequence
  Synthetic Sequence
cattcacgaa

SEQ ID NO: 8905 - DNA, 10 bp, Artificial Sequence
  Synthetic Sequence
gaagtagcag

SEQ ID NO: 8906 - DNA, 10 bp, Artificial Sequence
  Synthetic Sequence
ttgaggatcc

SEQ ID NO: 8907 - DNA, 10 bp, Artificial Sequence
  Synthetic Sequence
ccttgctggg

SEQ ID NO: 8908 - DNA, 10 bp, Artificial Sequence
  Synthetic Sequence
ctcaaccggt

SEQ ID NO: 8909 - DNA, 10 bp, Artificial Sequence
  Synthetic Sequence
tgtatagcag

SEQ ID NO: 8910 - DNA, 10 bp, Artificial Sequence
  Synthetic Sequence
cacattgagg

SEQ ID NO: 8911 - DNA, 10 bp, Artificial Sequence
  Synthetic Sequence
agcaattaca

SEQ ID NO: 8912 - DNA, 10 bp, Artificial Sequence
  Synthetic Sequence
tctagcggct

SEQ ID NO: 8913 - DNA, 10 bp, Artificial Sequence
  Synthetic Sequence
gaatgactgc

SEQ ID NO: 8914 - DNA, 10 bp, Artificial Sequence
  Synthetic Sequence
aacgatcctc

SEQ ID NO: 8915 - DNA, 10 bp, Artificial Sequence
  Synthetic Sequence
tacgtggata

SEQ ID NO: 8916 - DNA, 10 bp, Artificial Sequence
  Synthetic Sequence
tatctctacg

SEQ ID NO: 8917 - DNA, 10 bp, Artificial Sequence
  Synthetic Sequence
gccgggatgt

SEQ ID NO: 8918 - DNA, 10 bp, Artificial Sequence
  Synthetic Sequence
gacctcattc

SEQ ID NO: 8919 - DNA, 10 bp, Artificial Sequence
  Synthetic Sequence
ccagcgcttt

SEQ ID NO: 8920 - DNA, 10 bp, Artificial Sequence
  Synthetic Sequence
cgacttggtt

SEQ ID NO: 8921 - DNA, 10 bp, Artificial Sequence
  Synthetic Sequence
tgatctaggt

SEQ ID NO: 8922 - DNA, 10 bp, Artificial Sequence
  Synthetic Sequence
tacgtcgggc

SEQ ID NO: 8923 - DNA, 10 bp, Artificial Sequence
  Synthetic Sequence
cccgacccaa

SEQ ID NO: 8924 - DNA, 10 bp, Artificial Sequence
  Synthetic Sequence
gcctggttct

SEQ ID NO: 8925 - DNA, 10 bp, Artificial Sequence
  Synthetic Sequence
acatccagtc

SEQ ID NO: 8926 - DNA, 10 bp, Artificial Sequence
  Synthetic Sequence
tctccgacta

SEQ ID NO: 8927 - DNA, 10 bp, Artificial Sequence
  Synthetic Sequence
catttacacg

SEQ ID NO: 8928 - DNA, 10 bp, Artificial Sequence
  Synthetic Sequence
tctttatagt

SEQ ID NO: 8929 - DNA, 10 bp, Artificial Sequence
  Synthetic Sequence
tatcccgccc

SEQ ID NO: 8930 - DNA, 10 bp, Artificial Sequence
  Synthetic Sequence
agcaacccta

SEQ ID NO: 8931 - DNA, 10 bp, Artificial Sequence
  Synthetic Sequence
ggtcatggaa

SEQ ID NO: 8932 - DNA, 10 bp, Artificial Sequence
  Synthetic Sequence
cctcggctga

SEQ ID NO: 8933 - DNA, 10 bp, Artificial Sequence
  Synthetic Sequence
acttggcgag

SEQ ID NO: 8934 - DNA, 10 bp, Artificial Sequence
  Synthetic Sequence
tcatacgtaa

SEQ ID NO: 8935 - DNA, 10 bp, Artificial Sequence
  Synthetic Sequence
ttatacaccc

SEQ ID NO: 8936 - DNA, 10 bp, Artificial Sequence
  Synthetic Sequence
gtggcaggtc

SEQ ID NO: 8937 - DNA, 10 bp, Artificial Sequence
  Synthetic Sequence
gtccgtcgaa

SEQ ID NO: 8938 - DNA, 10 bp, Artificial Sequence
  Synthetic Sequence
gaggcagaag

SEQ ID NO: 8939 - DNA, 10 bp, Artificial Sequence
  Synthetic Sequence
atatttccac

SEQ ID NO: 8940 - DNA, 10 bp, Artificial Sequence
  Synthetic Sequence
ctagtgaata

SEQ ID NO: 8941 - DNA, 10 bp, Artificial Sequence
  Synthetic Sequence
ctcaaagtgg

SEQ ID NO: 8942 - DNA, 10 bp, Artificial Sequence
  Synthetic Sequence
agggtcagaa

SEQ ID NO: 8943 - DNA, 10 bp, Artificial Sequence
  Synthetic Sequence
gatttgcacc

SEQ ID NO: 8944 - DNA, 10 bp, Artificial Sequence
  Synthetic Sequence
cacaattagc

SEQ ID NO: 8945 - DNA, 10 bp, Artificial Sequence
  Synthetic Sequence
acggtcctaa

SEQ ID NO: 8946 - DNA, 10 bp, Artificial Sequence
  Synthetic Sequence
tcgaaagacc

SEQ ID NO: 8947 - DNA, 10 bp, Artificial Sequence
  Synthetic Sequence
gtaccgtcat

SEQ ID NO: 8948 - DNA, 10 bp, Artificial Sequence
  Synthetic Sequence
gcacaaagtt

SEQ ID NO: 8949 - DNA, 10 bp, Artificial Sequence
  Synthetic Sequence
ccgcatgctc

SEQ ID NO: 8950 - DNA, 10 bp, Artificial Sequence
  Synthetic Sequence
cagacctggt

SEQ ID NO: 8951 - DNA, 10 bp, Artificial Sequence
  Synthetic Sequence
atagagccgc

SEQ ID NO: 8952 - DNA, 10 bp, Artificial Sequence
  Synthetic Sequence
atctgcaccc

SEQ ID NO: 8953 - DNA, 10 bp, Artificial Sequence
  Synthetic Sequence
cgcggatctc

SEQ ID NO: 8954 - DNA, 10 bp, Artificial Sequence
  Synthetic Sequence
gttatggact

SEQ ID NO: 8955 - DNA, 10 bp, Artificial Sequence
  Synthetic Sequence
acgaacacgc

SEQ ID NO: 8956 - DNA, 10 bp, Artificial Sequence
  Synthetic Sequence
gtcaccacat

SEQ ID NO: 8957 - DNA, 10 bp, Artificial Sequence
  Synthetic Sequence
cggtccttct

SEQ ID NO: 8958 - DNA, 10 bp, Artificial Sequence
  Synthetic Sequence
ttgaatctga

SEQ ID NO: 8959 - DNA, 10 bp, Artificial Sequence
  Synthetic Sequence
caccctttcg

SEQ ID NO: 8960 - DNA, 10 bp, Artificial Sequence
  Synthetic Sequence
cgcgtcgcta

SEQ ID NO: 8961 - DNA, 10 bp, Artificial Sequence
  Synthetic Sequence
ataaccctga

SEQ ID NO: 8962 - DNA, 10 bp, Artificial Sequence
  Synthetic Sequence
cgtttatgca

SEQ ID NO: 8963 - DNA, 10 bp, Artificial Sequence
  Synthetic Sequence
aaagcgggag

SEQ ID NO: 8964 - DNA, 10 bp, Artificial Sequence
  Synthetic Sequence
gcatatcggt

SEQ ID NO: 8965 - DNA, 10 bp, Artificial Sequence
  Synthetic Sequence
atcggcggat

SEQ ID NO: 8966 - DNA, 10 bp, Artificial Sequence
  Synthetic Sequence
gattaagttt

SEQ ID NO: 8967 - DNA, 10 bp, Artificial Sequence
  Synthetic Sequence
gaagtttagt

SEQ ID NO: 8968 - DNA, 10 bp, Artificial Sequence
  Synthetic Sequence
taggcattat

SEQ ID NO: 8969 - DNA, 10 bp, Artificial Sequence
  Synthetic Sequence
tctctggagt

SEQ ID NO: 8970 - DNA, 10 bp, Artificial Sequence
  Synthetic Sequence
ctactagcta

SEQ ID NO: 8971 - DNA, 10 bp, Artificial Sequence
  Synthetic Sequence
atatgctatg

SEQ ID NO: 8972 - DNA, 10 bp, Artificial Sequence
  Synthetic Sequence
gtgtgttccc

SEQ ID NO: 8973 - DNA, 10 bp, Artificial Sequence
  Synthetic Sequence
gttagatgca

SEQ ID NO: 8974 - DNA, 10 bp, Artificial Sequence
  Synthetic Sequence
tctgagttag

SEQ ID NO: 8975 - DNA, 10 bp, Artificial Sequence
  Synthetic Sequence
tactagcgat

SEQ ID NO: 8976 - DNA, 10 bp, Artificial Sequence
  Synthetic Sequence
gggagttcag

SEQ ID NO: 8977 - DNA, 10 bp, Artificial Sequence
  Synthetic Sequence
tacacccacg

SEQ ID NO: 8978 - DNA, 10 bp, Artificial Sequence
  Synthetic Sequence
tttcgtgtat

SEQ ID NO: 8979 - DNA, 10 bp, Artificial Sequence
  Synthetic Sequence
aaatgtaata

SEQ ID NO: 8980 - DNA, 10 bp, Artificial Sequence
  Synthetic Sequence
cgctagcaag

SEQ ID NO: 8981 - DNA, 10 bp, Artificial Sequence
  Synthetic Sequence
atagtatttc

SEQ ID NO: 8982 - DNA, 10 bp, Artificial Sequence
  Synthetic Sequence
acgtatattg

SEQ ID NO: 8983 - DNA, 10 bp, Artificial Sequence
  Synthetic Sequence
aagcccgcgt

SEQ ID NO: 8984 - DNA, 10 bp, Artificial Sequence
  Synthetic Sequence
ggactaccgg

SEQ ID NO: 8985 - DNA, 10 bp, Artificial Sequence
  Synthetic Sequence
tttgtatgct

SEQ ID NO: 8986 - DNA, 10 bp, Artificial Sequence
  Synthetic Sequence
atgtagtcac

SEQ ID NO: 8987 - DNA, 10 bp, Artificial Sequence
  Synthetic Sequence
ttatgggtat

SEQ ID NO: 8988 - DNA, 10 bp, Artificial Sequence
  Synthetic Sequence
cgggtagttg

SEQ ID NO: 8989 - DNA, 10 bp, Artificial Sequence
  Synthetic Sequence
ctccgacacg

SEQ ID NO: 8990 - DNA, 10 bp, Artificial Sequence
  Synthetic Sequence
tcggcaggac

SEQ ID NO: 8991 - DNA, 10 bp, Artificial Sequence
  Synthetic Sequence
ctatagccgt

SEQ ID NO: 8992 - DNA, 10 bp, Artificial Sequence
  Synthetic Sequence
aaatgcggag

SEQ ID NO: 8993 - DNA, 10 bp, Artificial Sequence
  Synthetic Sequence
taaagttgtc

SEQ ID NO: 8994 - DNA, 10 bp, Artificial Sequence
  Synthetic Sequence
gtcatatcgt

SEQ ID NO: 8995 - DNA, 10 bp, Artificial Sequence
  Synthetic Sequence
gaccatgagg

SEQ ID NO: 8996 - DNA, 10 bp, Artificial Sequence
  Synthetic Sequence
aggttactta

SEQ ID NO: 8997 - DNA, 10 bp, Artificial Sequence
  Synthetic Sequence
acagtctgtg

SEQ ID NO: 8998 - DNA, 10 bp, Artificial Sequence
  Synthetic Sequence
accatactcc

SEQ ID NO: 8999 - DNA, 10 bp, Artificial Sequence
  Synthetic Sequence
ctagatccga

SEQ ID NO: 9000 - DNA, 10 bp, Artificial Sequence
  Synthetic Sequence
tcttgaccgt

SEQ ID NO: 9001 - DNA, 10 bp, Artificial Sequence
  Synthetic Sequence
gagaaatact

SEQ ID NO: 9002 - DNA, 10 bp, Artificial Sequence
  Synthetic Sequence
cgtcccgact

SEQ ID NO: 9003 - DNA, 10 bp, Artificial Sequence
  Synthetic Sequence
tcgcaaagag

SEQ ID NO: 9004 - DNA, 10 bp, Artificial Sequence
  Synthetic Sequence
ttcccttccc

SEQ ID NO: 9005 - DNA, 10 bp, Artificial Sequence
  Synthetic Sequence
atggaggcgt

SEQ ID NO: 9006 - DNA, 10 bp, Artificial Sequence
  Synthetic Sequence
agaggatggt

SEQ ID NO: 9007 - DNA, 10 bp, Artificial Sequence
  Synthetic Sequence
tgcggagtat

SEQ ID NO: 9008 - DNA, 10 bp, Artificial Sequence
  Synthetic Sequence
ctttgggcca

SEQ ID NO: 9009 - DNA, 10 bp, Artificial Sequence
  Synthetic Sequence
gcaattagtc

SEQ ID NO: 9010 - DNA, 10 bp, Artificial Sequence
  Synthetic Sequence
gatactcgac

SEQ ID NO: 9011 - DNA, 10 bp, Artificial Sequence
  Synthetic Sequence
ctgcgaataa

SEQ ID NO: 9012 - DNA, 10 bp, Artificial Sequence
  Synthetic Sequence
agtggaacgc

SEQ ID NO: 9013 - DNA, 10 bp, Artificial Sequence
  Synthetic Sequence
aacattcggc

SEQ ID NO: 9014 - DNA, 10 bp, Artificial Sequence
  Synthetic Sequence
tatgtatggc

SEQ ID NO: 9015 - DNA, 10 bp, Artificial Sequence
  Synthetic Sequence
gaacgagtaa

SEQ ID NO: 9016 - DNA, 10 bp, Artificial Sequence
  Synthetic Sequence
acaccgtatg

SEQ ID NO: 9017 - DNA, 10 bp, Artificial Sequence
  Synthetic Sequence
tttccctttc

SEQ ID NO: 9018 - DNA, 10 bp, Artificial Sequence
  Synthetic Sequence
cgcacagcga

SEQ ID NO: 9019 - DNA, 10 bp, Artificial Sequence
  Synthetic Sequence
ttgccctcgt

SEQ ID NO: 9020 - DNA, 10 bp, Artificial Sequence
  Synthetic Sequence
atccaaagct

SEQ ID NO: 9021 - DNA, 10 bp, Artificial Sequence
  Synthetic Sequence
gggtacatga

SEQ ID NO: 9022 - DNA, 10 bp, Artificial Sequence
  Synthetic Sequence
atacctatat

SEQ ID NO: 9023 - DNA, 10 bp, Artificial Sequence
  Synthetic Sequence
gtctaactcc

SEQ ID NO: 9024 - DNA, 10 bp, Artificial Sequence
  Synthetic Sequence
gccaagattg

SEQ ID NO: 9025 - DNA, 10 bp, Artificial Sequence
  Synthetic Sequence
tgcttgttcc

SEQ ID NO: 9026 - DNA, 10 bp, Artificial Sequence
  Synthetic Sequence
agctaacatc

SEQ ID NO: 9027 - DNA, 10 bp, Artificial Sequence
  Synthetic Sequence
ccacatagtg

SEQ ID NO: 9028 - DNA, 10 bp, Artificial Sequence
  Synthetic Sequence
gtctcggaat

SEQ ID NO: 9029 - DNA, 10 bp, Artificial Sequence
  Synthetic Sequence
aggctatgtg

SEQ ID NO: 9030 - DNA, 10 bp, Artificial Sequence
  Synthetic Sequence
gaatgtggtg

SEQ ID NO: 9031 - DNA, 10 bp, Artificial Sequence
  Synthetic Sequence
gctaggttac

SEQ ID NO: 9032 - DNA, 10 bp, Artificial Sequence
  Synthetic Sequence
atgagctaat

SEQ ID NO: 9033 - DNA, 10 bp, Artificial Sequence
  Synthetic Sequence
gcgtaacttg

SEQ ID NO: 9034 - DNA, 10 bp, Artificial Sequence
  Synthetic Sequence
cagaaattat

SEQ ID NO: 9035 - DNA, 10 bp, Artificial Sequence
  Synthetic Sequence
ccatctacaa

SEQ ID NO: 9036 - DNA, 10 bp, Artificial Sequence
  Synthetic Sequence
gccttatttc

SEQ ID NO: 9037 - DNA, 10 bp, Artificial Sequence
  Synthetic Sequence
caggccagca

SEQ ID NO: 9038 - DNA, 10 bp, Artificial Sequence
  Synthetic Sequence
acttacataa

SEQ ID NO: 9039 - DNA, 10 bp, Artificial Sequence
  Synthetic Sequence
catgggtgtg

SEQ ID NO: 9040 - DNA, 10 bp, Artificial Sequence
  Synthetic Sequence
actcgggaag

SEQ ID NO: 9041 - DNA, 10 bp, Artificial Sequence
  Synthetic Sequence
attggcgagc

SEQ ID NO: 9042 - DNA, 10 bp, Artificial Sequence
  Synthetic Sequence
taattcgtag

SEQ ID NO: 9043 - DNA, 10 bp, Artificial Sequence
  Synthetic Sequence
caatcatggt

SEQ ID NO: 9044 - DNA, 10 bp, Artificial Sequence
  Synthetic Sequence
acgttcttag

SEQ ID NO: 9045 - DNA, 10 bp, Artificial Sequence
  Synthetic Sequence
tagcttccgg

SEQ ID NO: 9046 - DNA, 10 bp, Artificial Sequence
  Synthetic Sequence
agaacatgtt

SEQ ID NO: 9047 - DNA, 10 bp, Artificial Sequence
  Synthetic Sequence
gacttccgcg

SEQ ID NO: 9048 - DNA, 10 bp, Artificial Sequence
  Synthetic Sequence
tcctcgccca

SEQ ID NO: 9049 - DNA, 10 bp, Artificial Sequence
  Synthetic Sequence
tcgcatccct

SEQ ID NO: 9050 - DNA, 10 bp, Artificial Sequence
  Synthetic Sequence
acctctccat

SEQ ID NO: 9051 - DNA, 10 bp, Artificial Sequence
  Synthetic Sequence
tcataacagt

SEQ ID NO: 9052 - DNA, 10 bp, Artificial Sequence
  Synthetic Sequence
ataagagata

SEQ ID NO: 9053 - DNA, 10 bp, Artificial Sequence
  Synthetic Sequence
agcgggaata

SEQ ID NO: 9054 - DNA, 10 bp, Artificial Sequence
  Synthetic Sequence
caataggtag

SEQ ID NO: 9055 - DNA, 10 bp, Artificial Sequence
  Synthetic Sequence
acttcgggtg

SEQ ID NO: 9056 - DNA, 10 bp, Artificial Sequence
  Synthetic Sequence
tgatgactgg

SEQ ID NO: 9057 - DNA, 10 bp, Artificial Sequence
  Synthetic Sequence
acgtacggtt

SEQ ID NO: 9058 - DNA, 10 bp, Artificial Sequence
  Synthetic Sequence
gtccgtaatt

SEQ ID NO: 9059 - DNA, 10 bp, Artificial Sequence
  Synthetic Sequence
aaccacacgt

SEQ ID NO: 9060 - DNA, 10 bp, Artificial Sequence
  Synthetic Sequence
cactccatgt

SEQ ID NO: 9061 - DNA, 10 bp, Artificial Sequence
  Synthetic Sequence
atacacaact

SEQ ID NO: 9062 - DNA, 10 bp, Artificial Sequence
  Synthetic Sequence
actagtccgc

SEQ ID NO: 9063 - DNA, 10 bp, Artificial Sequence
  Synthetic Sequence
cgccctggta

SEQ ID NO: 9064 - DNA, 10 bp, Artificial Sequence
  Synthetic Sequence
ccgtgaaccg

SEQ ID NO: 9065 - DNA, 10 bp, Artificial Sequence
  Synthetic Sequence
atgttgggta

SEQ ID NO: 9066 - DNA, 10 bp, Artificial Sequence
  Synthetic Sequence
ccggaacgct

SEQ ID NO: 9067 - DNA, 10 bp, Artificial Sequence
  Synthetic Sequence
tcctgatcaa

SEQ ID NO: 9068 - DNA, 10 bp, Artificial Sequence
  Synthetic Sequence
gtccgatctg

SEQ ID NO: 9069 - DNA, 10 bp, Artificial Sequence
  Synthetic Sequence
gttatgatga

SEQ ID NO: 9070 - DNA, 10 bp, Artificial Sequence
  Synthetic Sequence
tgtccgatgc

SEQ ID NO: 9071 - DNA, 10 bp, Artificial Sequence
  Synthetic Sequence
cgggtgcctt

SEQ ID NO: 9072 - DNA, 10 bp, Artificial Sequence
  Synthetic Sequence
gtcaacagca

SEQ ID NO: 9073 - DNA, 10 bp, Artificial Sequence
  Synthetic Sequence
gtcctgcgtc

SEQ ID NO: 9074 - DNA, 10 bp, Artificial Sequence
  Synthetic Sequence
tgggtagaac

SEQ ID NO: 9075 - DNA, 10 bp, Artificial Sequence
  Synthetic Sequence
gtccagctca

SEQ ID NO: 9076 - DNA, 10 bp, Artificial Sequence
  Synthetic Sequence
ggctcaaatg

SEQ ID NO: 9077 - DNA, 10 bp, Artificial Sequence
  Synthetic Sequence
atcatacata

SEQ ID NO: 9078 - DNA, 10 bp, Artificial Sequence
  Synthetic Sequence
ccaaagacga

SEQ ID NO: 9079 - DNA, 10 bp, Artificial Sequence
  Synthetic Sequence
tttcgaacca

SEQ ID NO: 9080 - DNA, 10 bp, Artificial Sequence
  Synthetic Sequence
aacaccgagt

SEQ ID NO: 9081 - DNA, 10 bp, Artificial Sequence
  Synthetic Sequence
gctacacgca

SEQ ID NO: 9082 - DNA, 10 bp, Artificial Sequence
  Synthetic Sequence
caaacattcc

SEQ ID NO: 9083 - DNA, 10 bp, Artificial Sequence
  Synthetic Sequence
tcggcctgga

SEQ ID NO: 9084 - DNA, 10 bp, Artificial Sequence
  Synthetic Sequence
aggctcgatg

SEQ ID NO: 9085 - DNA, 10 bp, Artificial Sequence
  Synthetic Sequence
atgttgtaga

SEQ ID NO: 9086 - DNA, 10 bp, Artificial Sequence
  Synthetic Sequence
ttctaacgtg

SEQ ID NO: 9087 - DNA, 10 bp, Artificial Sequence
  Synthetic Sequence
aaactggtcc

SEQ ID NO: 9088 - DNA, 10 bp, Artificial Sequence
  Synthetic Sequence
ccgaggaatg

SEQ ID NO: 9089 - DNA, 10 bp, Artificial Sequence
  Synthetic Sequence
ttatgttcca

SEQ ID NO: 9090 - DNA, 10 bp, Artificial Sequence
  Synthetic Sequence
ccaagagcaa

SEQ ID NO: 9091 - DNA, 10 bp, Artificial Sequence
  Synthetic Sequence
aattgattat

SEQ ID NO: 9092 - DNA, 10 bp, Artificial Sequence
  Synthetic Sequence
tcaggtatat

SEQ ID NO: 9093 - DNA, 10 bp, Artificial Sequence
  Synthetic Sequence
cttgaggccc

SEQ ID NO: 9094 - DNA, 10 bp, Artificial Sequence
  Synthetic Sequence
gaaacaaagg

SEQ ID NO: 9095 - DNA, 10 bp, Artificial Sequence
  Synthetic Sequence
cggacagtct

SEQ ID NO: 9096 - DNA, 10 bp, Artificial Sequence
  Synthetic Sequence
tcggtaaggt

SEQ ID NO: 9097 - DNA, 10 bp, Artificial Sequence
  Synthetic Sequence
tgggaaacat

SEQ ID NO: 9098 - DNA, 10 bp, Artificial Sequence
  Synthetic Sequence
ggctaaggcc

SEQ ID NO: 9099 - DNA, 10 bp, Artificial Sequence
  Synthetic Sequence
atcgtgctcc

SEQ ID NO: 9100 - DNA, 10 bp, Artificial Sequence
  Synthetic Sequence
tcatctaaga

SEQ ID NO: 9101 - DNA, 10 bp, Artificial Sequence
  Synthetic Sequence
cgtcgacagt

SEQ ID NO: 9102 - DNA, 10 bp, Artificial Sequence
  Synthetic Sequence
agaatcaagc

SEQ ID NO: 9103 - DNA, 10 bp, Artificial Sequence
  Synthetic Sequence
acctgcctga

SEQ ID NO: 9104 - DNA, 10 bp, Artificial Sequence
  Synthetic Sequence
tctcctgtcg

SEQ ID NO: 9105 - DNA, 10 bp, Artificial Sequence
  Synthetic Sequence
gtttcctgta

SEQ ID NO: 9106 - DNA, 10 bp, Artificial Sequence
  Synthetic Sequence
atcgtcgcgt

SEQ ID NO: 9107 - DNA, 10 bp, Artificial Sequence
  Synthetic Sequence
cagaggatgt

SEQ ID NO: 9108 - DNA, 10 bp, Artificial Sequence
  Synthetic Sequence
acacgccgca

SEQ ID NO: 9109 - DNA, 10 bp, Artificial Sequence
  Synthetic Sequence
atccggcagg

SEQ ID NO: 9110 - DNA, 10 bp, Artificial Sequence
  Synthetic Sequence
ttgtcgactt

SEQ ID NO: 9111 - DNA, 10 bp, Artificial Sequence
  Synthetic Sequence
gaaactgtga

SEQ ID NO: 9112 - DNA, 10 bp, Artificial Sequence
  Synthetic Sequence
cgcatacagg

SEQ ID NO: 9113 - DNA, 10 bp, Artificial Sequence
  Synthetic Sequence
tcgggtcatt

SEQ ID NO: 9114 - DNA, 10 bp, Artificial Sequence
  Synthetic Sequence
ctgggctcca

SEQ ID NO: 9115 - DNA, 10 bp, Artificial Sequence
  Synthetic Sequence
aagctactga

SEQ ID NO: 9116 - DNA, 10 bp, Artificial Sequence
  Synthetic Sequence
gatccgtctt

SEQ ID NO: 9117 - DNA, 10 bp, Artificial Sequence
  Synthetic Sequence
tgaacgtgcg

SEQ ID NO: 9118 - DNA, 10 bp, Artificial Sequence
  Synthetic Sequence
gttcttacag

SEQ ID NO: 9119 - DNA, 10 bp, Artificial Sequence
  Synthetic Sequence
gatacgataa

SEQ ID NO: 9120 - DNA, 10 bp, Artificial Sequence
  Synthetic Sequence
tcggactagg

SEQ ID NO: 9121 - DNA, 10 bp, Artificial Sequence
  Synthetic Sequence
aaagagtctc

SEQ ID NO: 9122 - DNA, 10 bp, Artificial Sequence
  Synthetic Sequence
gagctccttg

SEQ ID NO: 9123 - DNA, 10 bp, Artificial Sequence
  Synthetic Sequence
aataacacac

SEQ ID NO: 9124 - DNA, 10 bp, Artificial Sequence
  Synthetic Sequence
tagacccgct

SEQ ID NO: 9125 - DNA, 10 bp, Artificial Sequence
  Synthetic Sequence
tcttggtaga

SEQ ID NO: 9126 - DNA, 10 bp, Artificial Sequence
  Synthetic Sequence
gcacggctca

SEQ ID NO: 9127 - DNA, 10 bp, Artificial Sequence
  Synthetic Sequence
aagtaggatg

SEQ ID NO: 9128 - DNA, 10 bp, Artificial Sequence
  Synthetic Sequence
ctcagagatg

SEQ ID NO: 9129 - DNA, 10 bp, Artificial Sequence
  Synthetic Sequence
atacaatatt

SEQ ID NO: 9130 - DNA, 10 bp, Artificial Sequence
  Synthetic Sequence
ggagtaattc

SEQ ID NO: 9131 - DNA, 10 bp, Artificial Sequence
  Synthetic Sequence
cctcatattc

SEQ ID NO: 9132 - DNA, 10 bp, Artificial Sequence
  Synthetic Sequence
gcgtccagct

SEQ ID NO: 9133 - DNA, 10 bp, Artificial Sequence
  Synthetic Sequence
gagataacac

SEQ ID NO: 9134 - DNA, 10 bp, Artificial Sequence
  Synthetic Sequence
atggatagtc

SEQ ID NO: 9135 - DNA, 10 bp, Artificial Sequence
  Synthetic Sequence
gtcttaggct

SEQ ID NO: 9136 - DNA, 10 bp, Artificial Sequence
  Synthetic Sequence
cgactttcaa

SEQ ID NO: 9137 - DNA, 10 bp, Artificial Sequence
  Synthetic Sequence
ctgttatgcg

SEQ ID NO: 9138 - DNA, 10 bp, Artificial Sequence
  Synthetic Sequence
agggtaagcg

SEQ ID NO: 9139 - DNA, 10 bp, Artificial Sequence
  Synthetic Sequence
cactttggac

SEQ ID NO: 9140 - DNA, 10 bp, Artificial Sequence
  Synthetic Sequence
aagagccaca

SEQ ID NO: 9141 - DNA, 10 bp, Artificial Sequence
  Synthetic Sequence
gggctcctct

SEQ ID NO: 9142 - DNA, 10 bp, Artificial Sequence
  Synthetic Sequence
aagccgaccg

SEQ ID NO: 9143 - DNA, 10 bp, Artificial Sequence
  Synthetic Sequence
cataatggta

SEQ ID NO: 9144 - DNA, 10 bp, Artificial Sequence
  Synthetic Sequence
ggagactcca

SEQ ID NO: 9145 - DNA, 10 bp, Artificial Sequence
  Synthetic Sequence
gcatgcttac

SEQ ID NO: 9146 - DNA, 10 bp, Artificial Sequence
  Synthetic Sequence
tgcattgtgc

SEQ ID NO: 9147 - DNA, 10 bp, Artificial Sequence
  Synthetic Sequence
tatcagcgct

SEQ ID NO: 9148 - DNA, 10 bp, Artificial Sequence
  Synthetic Sequence
tcatctggta

SEQ ID NO: 9149 - DNA, 10 bp, Artificial Sequence
  Synthetic Sequence
cagtggaacg

SEQ ID NO: 9150 - DNA, 10 bp, Artificial Sequence
  Synthetic Sequence
cagttgggaa

SEQ ID NO: 9151 - DNA, 10 bp, Artificial Sequence
  Synthetic Sequence
gccttctgga

SEQ ID NO: 9152 - DNA, 10 bp, Artificial Sequence
  Synthetic Sequence
ttagcaatgt

SEQ ID NO: 9153 - DNA, 10 bp, Artificial Sequence
  Synthetic Sequence
tctttcctag

SEQ ID NO: 9154 - DNA, 10 bp, Artificial Sequence
  Synthetic Sequence
gagaaggcgc

SEQ ID NO: 9155 - DNA, 10 bp, Artificial Sequence
  Synthetic Sequence
ccgtgatttc

SEQ ID NO: 9156 - DNA, 10 bp, Artificial Sequence
  Synthetic Sequence
tttgtaccat

SEQ ID NO: 9157 - DNA, 10 bp, Artificial Sequence
  Synthetic Sequence
aagccttgtt

SEQ ID NO: 9158 - DNA, 10 bp, Artificial Sequence
  Synthetic Sequence
aaccatggaa

SEQ ID NO: 9159 - DNA, 10 bp, Artificial Sequence
  Synthetic Sequence
tcgggattgg

SEQ ID NO: 9160 - DNA, 10 bp, Artificial Sequence
  Synthetic Sequence
ggtgttaagg

SEQ ID NO: 9161 - DNA, 10 bp, Artificial Sequence
  Synthetic Sequence
gatacctgtc

SEQ ID NO: 9162 - DNA, 10 bp, Artificial Sequence
  Synthetic Sequence
attgacagca

SEQ ID NO: 9163 - DNA, 10 bp, Artificial Sequence
  Synthetic Sequence
gataccgacc

SEQ ID NO: 9164 - DNA, 10 bp, Artificial Sequence
  Synthetic Sequence
tgctaatgat

SEQ ID NO: 9165 - DNA, 10 bp, Artificial Sequence
  Synthetic Sequence
ccaacattag

SEQ ID NO: 9166 - DNA, 10 bp, Artificial Sequence
  Synthetic Sequence
agataagata

SEQ ID NO: 9167 - DNA, 10 bp, Artificial Sequence
  Synthetic Sequence
atctgtataa

SEQ ID NO: 9168 - DNA, 10 bp, Artificial Sequence
  Synthetic Sequence
tccagcatgc

SEQ ID NO: 9169 - DNA, 10 bp, Artificial Sequence
  Synthetic Sequence
aaatcgtggc

SEQ ID NO: 9170 - DNA, 10 bp, Artificial Sequence
  Synthetic Sequence
taattgccag

SEQ ID NO: 9171 - DNA, 10 bp, Artificial Sequence
  Synthetic Sequence
tcccagttat

SEQ ID NO: 9172 - DNA, 10 bp, Artificial Sequence
  Synthetic Sequence
gatgcgctcc

SEQ ID NO: 9173 - DNA, 10 bp, Artificial Sequence
  Synthetic Sequence
taattagaca

SEQ ID NO: 9174 - DNA, 10 bp, Artificial Sequence
  Synthetic Sequence
ctggtgcacc

SEQ ID NO: 9175 - DNA, 10 bp, Artificial Sequence
  Synthetic Sequence
agcccttatg

SEQ ID NO: 9176 - DNA, 10 bp, Artificial Sequence
  Synthetic Sequence
tgggcaactc

SEQ ID NO: 9177 - DNA, 10 bp, Artificial Sequence
  Synthetic Sequence
gttgctgtgc

SEQ ID NO: 9178 - DNA, 10 bp, Artificial Sequence
  Synthetic Sequence
acttggtctc

SEQ ID NO: 9179 - DNA, 10 bp, Artificial Sequence
  Synthetic Sequence
ctttccaatg

SEQ ID NO: 9180 - DNA, 10 bp, Artificial Sequence
  Synthetic Sequence
tgagtcacgc

SEQ ID NO: 9181 - DNA, 10 bp, Artificial Sequence
  Synthetic Sequence
tacggcattc

SEQ ID NO: 9182 - DNA, 10 bp, Artificial Sequence
  Synthetic Sequence
ttaattcctt

SEQ ID NO: 9183 - DNA, 10 bp, Artificial Sequence
  Synthetic Sequence
acactgatta

SEQ ID NO: 9184 - DNA, 10 bp, Artificial Sequence
  Synthetic Sequence
tgaggccggt

SEQ ID NO: 9185 - DNA, 10 bp, Artificial Sequence
  Synthetic Sequence
gcaagaggct

SEQ ID NO: 9186 - DNA, 10 bp, Artificial Sequence
  Synthetic Sequence
tacttctata

SEQ ID NO: 9187 - DNA, 10 bp, Artificial Sequence
  Synthetic Sequence
gcttcgctac

SEQ ID NO: 9188 - DNA, 10 bp, Artificial Sequence
  Synthetic Sequence
cccatttacg

SEQ ID NO: 9189 - DNA, 10 bp, Artificial Sequence
  Synthetic Sequence
cactgccttg

SEQ ID NO: 9190 - DNA, 10 bp, Artificial Sequence
  Synthetic Sequence
aagtgctcag

SEQ ID NO: 9191 - DNA, 10 bp, Artificial Sequence
  Synthetic Sequence
gctgctcgtt

SEQ ID NO: 9192 - DNA, 10 bp, Artificial Sequence
  Synthetic Sequence
gatagcgcag

SEQ ID NO: 9193 - DNA, 10 bp, Artificial Sequence
  Synthetic Sequence
ttcggaggga

SEQ ID NO: 9194 - DNA, 10 bp, Artificial Sequence
  Synthetic Sequence
ccaggtcaac

SEQ ID NO: 9195 - DNA, 10 bp, Artificial Sequence
  Synthetic Sequence
agcctccgag

SEQ ID NO: 9196 - DNA, 10 bp, Artificial Sequence
  Synthetic Sequence
aaccaggtac

SEQ ID NO: 9197 - DNA, 10 bp, Artificial Sequence
  Synthetic Sequence
gtggaggact

SEQ ID NO: 9198 - DNA, 10 bp, Artificial Sequence
  Synthetic Sequence
cgtgctgaac

SEQ ID NO: 9199 - DNA, 10 bp, Artificial Sequence
  Synthetic Sequence
acgatggcgt

SEQ ID NO: 9200 - DNA, 10 bp, Artificial Sequence
  Synthetic Sequence
gctgaaggga

SEQ ID NO: 9201 - DNA, 10 bp, Artificial Sequence
  Synthetic Sequence
aatattaagg

SEQ ID NO: 9202 - DNA, 10 bp, Artificial Sequence
  Synthetic Sequence
ctagggctta

SEQ ID NO: 9203 - DNA, 10 bp, Artificial Sequence
  Synthetic Sequence
caattcccat

SEQ ID NO: 9204 - DNA, 10 bp, Artificial Sequence
  Synthetic Sequence
gactctgcct

SEQ ID NO: 9205 - DNA, 10 bp, Artificial Sequence
  Synthetic Sequence
tgctcgacag

SEQ ID NO: 9206 - DNA, 10 bp, Artificial Sequence
  Synthetic Sequence
aaacacatcc

SEQ ID NO: 9207 - DNA, 10 bp, Artificial Sequence
  Synthetic Sequence
ggttggtacc

SEQ ID NO: 9208 - DNA, 10 bp, Artificial Sequence
  Synthetic Sequence
atttgtcgtc

SEQ ID NO: 9209 - DNA, 10 bp, Artificial Sequence
  Synthetic Sequence
aacgtgacac

SEQ ID NO: 9210 - DNA, 10 bp, Artificial Sequence
  Synthetic Sequence
caagacgtgg

SEQ ID NO: 9211 - DNA, 10 bp, Artificial Sequence
  Synthetic Sequence
cgtgcttcgg

SEQ ID NO: 9212 - DNA, 10 bp, Artificial Sequence
  Synthetic Sequence
gcggtgtgga

SEQ ID NO: 9213 - DNA, 10 bp, Artificial Sequence
  Synthetic Sequence
gcacttcact

SEQ ID NO: 9214 - DNA, 10 bp, Artificial Sequence
  Synthetic Sequence
catgttcctg

SEQ ID NO: 9215 - DNA, 10 bp, Artificial Sequence
  Synthetic Sequence
tcgaggcctc

SEQ ID NO: 9216 - DNA, 10 bp, Artificial Sequence
  Synthetic Sequence
cgaatgaagt

SEQ ID NO: 9217 - DNA, 10 bp, Artificial Sequence
  Synthetic Sequence
aagcaatcct

SEQ ID NO: 9218 - DNA, 10 bp, Artificial Sequence
  Synthetic Sequence
acttgaagca

SEQ ID NO: 9219 - DNA, 10 bp, Artificial Sequence
  Synthetic Sequence
tggtacctag

SEQ ID NO: 9220 - DNA, 10 bp, Artificial Sequence
  Synthetic Sequence
ctgcccgaca

SEQ ID NO: 9221 - DNA, 10 bp, Artificial Sequence
  Synthetic Sequence
ttaagtagat

SEQ ID NO: 9222 - DNA, 10 bp, Artificial Sequence
  Synthetic Sequence
gtactatgtg

SEQ ID NO: 9223 - DNA, 10 bp, Artificial Sequence
  Synthetic Sequence
gctgtcaaat

SEQ ID NO: 9224 - DNA, 10 bp, Artificial Sequence
  Synthetic Sequence
agtgcgcgtc

SEQ ID NO: 9225 - DNA, 10 bp, Artificial Sequence
  Synthetic Sequence
ggccgttctt

SEQ ID NO: 9226 - DNA, 10 bp, Artificial Sequence
  Synthetic Sequence
catcaatacc

SEQ ID NO: 9227 - DNA, 10 bp, Artificial Sequence
  Synthetic Sequence
atagagggaa

SEQ ID NO: 9228 - DNA, 10 bp, Artificial Sequence
  Synthetic Sequence
atacaaacac

SEQ ID NO: 9229 - DNA, 10 bp, Artificial Sequence
  Synthetic Sequence
ctacacccat

SEQ ID NO: 9230 - DNA, 10 bp, Artificial Sequence
  Synthetic Sequence
tagggatccg

SEQ ID NO: 9231 - DNA, 10 bp, Artificial Sequence
  Synthetic Sequence
acccttgcgg

SEQ ID NO: 9232 - DNA, 10 bp, Artificial Sequence
  Synthetic Sequence
aagcggatga

SEQ ID NO: 9233 - DNA, 10 bp, Artificial Sequence
  Synthetic Sequence
ttctagaagt

SEQ ID NO: 9234 - DNA, 10 bp, Artificial Sequence
  Synthetic Sequence
caggtgagac

SEQ ID NO: 9235 - DNA, 10 bp, Artificial Sequence
  Synthetic Sequence
actactcccg

SEQ ID NO: 9236 - DNA, 10 bp, Artificial Sequence
  Synthetic Sequence
tatcgtcttt

SEQ ID NO: 9237 - DNA, 10 bp, Artificial Sequence
  Synthetic Sequence
gtccgactga

SEQ ID NO: 9238 - DNA, 10 bp, Artificial Sequence
  Synthetic Sequence
atataaactg

SEQ ID NO: 9239 - DNA, 10 bp, Artificial Sequence
  Synthetic Sequence
gatatgtgat

SEQ ID NO: 9240 - DNA, 10 bp, Artificial Sequence
  Synthetic Sequence
tatttcgcaa

SEQ ID NO: 9241 - DNA, 10 bp, Artificial Sequence
  Synthetic Sequence
gatgcacata

SEQ ID NO: 9242 - DNA, 10 bp, Artificial Sequence
  Synthetic Sequence
tatggccctt

SEQ ID NO: 9243 - DNA, 10 bp, Artificial Sequence
  Synthetic Sequence
ctattattca

SEQ ID NO: 9244 - DNA, 10 bp, Artificial Sequence
  Synthetic Sequence
atcacgacca

SEQ ID NO: 9245 - DNA, 10 bp, Artificial Sequence
  Synthetic Sequence
gctcttactt

SEQ ID NO: 9246 - DNA, 10 bp, Artificial Sequence
  Synthetic Sequence
ggacccactc

SEQ ID NO: 9247 - DNA, 10 bp, Artificial Sequence
  Synthetic Sequence
actgacgtcg

SEQ ID NO: 9248 - DNA, 10 bp, Artificial Sequence
  Synthetic Sequence
aagttgttca

SEQ ID NO: 9249 - DNA, 10 bp, Artificial Sequence
  Synthetic Sequence
atttgtggaa

SEQ ID NO: 9250 - DNA, 10 bp, Artificial Sequence
  Synthetic Sequence
gacctttgac

SEQ ID NO: 9251 - DNA, 10 bp, Artificial Sequence
  Synthetic Sequence
gaagagcccg

SEQ ID NO: 9252 - DNA, 10 bp, Artificial Sequence
  Synthetic Sequence
gcgggagatt

SEQ ID NO: 9253 - DNA, 10 bp, Artificial Sequence
  Synthetic Sequence
atctgctgtc

SEQ ID NO: 9254 - DNA, 10 bp, Artificial Sequence
  Synthetic Sequence
ttacgggcct

SEQ ID NO: 9255 - DNA, 10 bp, Artificial Sequence
  Synthetic Sequence
attgtttaat

SEQ ID NO: 9256 - DNA, 10 bp, Artificial Sequence
  Synthetic Sequence
gcaatacctt

SEQ ID NO: 9257 - DNA, 10 bp, Artificial Sequence
  Synthetic Sequence
gattattccc

SEQ ID NO: 9258 - DNA, 10 bp, Artificial Sequence
  Synthetic Sequence
ccggatctac

SEQ ID NO: 9259 - DNA, 10 bp, Artificial Sequence
  Synthetic Sequence
ctccatgtcg

SEQ ID NO: 9260 - DNA, 10 bp, Artificial Sequence
  Synthetic Sequence
tcacatacgg

SEQ ID NO: 9261 - DNA, 10 bp, Artificial Sequence
  Synthetic Sequence
ttcaacgttt

SEQ ID NO: 9262 - DNA, 10 bp, Artificial Sequence
  Synthetic Sequence
ggtctcagac

SEQ ID NO: 9263 - DNA, 10 bp, Artificial Sequence
  Synthetic Sequence
cattccacct

SEQ ID NO: 9264 - DNA, 10 bp, Artificial Sequence
  Synthetic Sequence
tggccgctag

SEQ ID NO: 9265 - DNA, 10 bp, Artificial Sequence
  Synthetic Sequence
cgatttatat

SEQ ID NO: 9266 - DNA, 10 bp, Artificial Sequence
  Synthetic Sequence
ccagtcttgg

SEQ ID NO: 9267 - DNA, 10 bp, Artificial Sequence
  Synthetic Sequence
gtgcagcgtg

SEQ ID NO: 9268 - DNA, 10 bp, Artificial Sequence
  Synthetic Sequence
tcacatgtct

SEQ ID NO: 9269 - DNA, 10 bp, Artificial Sequence
  Synthetic Sequence
cctcctaggg

SEQ ID NO: 9270 - DNA, 10 bp, Artificial Sequence
  Synthetic Sequence
tgtaggtaag

SEQ ID NO: 9271 - DNA, 10 bp, Artificial Sequence
  Synthetic Sequence
agatgaaccg

SEQ ID NO: 9272 - DNA, 10 bp, Artificial Sequence
  Synthetic Sequence
ctagggaggt

SEQ ID NO: 9273 - DNA, 10 bp, Artificial Sequence
  Synthetic Sequence
atgccacgat

SEQ ID NO: 9274 - DNA, 10 bp, Artificial Sequence
  Synthetic Sequence
cagagcaggg

SEQ ID NO: 9275 - DNA, 10 bp, Artificial Sequence
  Synthetic Sequence
agtgaagtga

SEQ ID NO: 9276 - DNA, 10 bp, Artificial Sequence
  Synthetic Sequence
agggagtaga

SEQ ID NO: 9277 - DNA, 10 bp, Artificial Sequence
  Synthetic Sequence
ggttgctcaa

SEQ ID NO: 9278 - DNA, 10 bp, Artificial Sequence
  Synthetic Sequence
gagcacggta

SEQ ID NO: 9279 - DNA, 10 bp, Artificial Sequence
  Synthetic Sequence
cagcgagtcg

SEQ ID NO: 9280 - DNA, 10 bp, Artificial Sequence
  Synthetic Sequence
attctcctga

SEQ ID NO: 9281 - DNA, 10 bp, Artificial Sequence
  Synthetic Sequence
acagttaagt

SEQ ID NO: 9282 - DNA, 10 bp, Artificial Sequence
  Synthetic Sequence
attcactcga

SEQ ID NO: 9283 - DNA, 10 bp, Artificial Sequence
  Synthetic Sequence
tccaaataag

SEQ ID NO: 9284 - DNA, 10 bp, Artificial Sequence
  Synthetic Sequence
tcacggcatg

SEQ ID NO: 9285 - DNA, 10 bp, Artificial Sequence
  Synthetic Sequence
accgttcatt

SEQ ID NO: 9286 - DNA, 10 bp, Artificial Sequence
  Synthetic Sequence
cgatggacga

SEQ ID NO: 9287 - DNA, 10 bp, Artificial Sequence
  Synthetic Sequence
ccgaatgtga

SEQ ID NO: 9288 - DNA, 10 bp, Artificial Sequence
  Synthetic Sequence
gttgcgccct

SEQ ID NO: 9289 - DNA, 10 bp, Artificial Sequence
  Synthetic Sequence
ccctattgta

SEQ ID NO: 9290 - DNA, 10 bp, Artificial Sequence
  Synthetic Sequence
tttagtacgg

SEQ ID NO: 9291 - DNA, 10 bp, Artificial Sequence
  Synthetic Sequence
actccagtgg

SEQ ID NO: 9292 - DNA, 10 bp, Artificial Sequence
  Synthetic Sequence
taggtctaag

SEQ ID NO: 9293 - DNA, 10 bp, Artificial Sequence
  Synthetic Sequence
tccgacatgg

SEQ ID NO: 9294 - DNA, 10 bp, Artificial Sequence
  Synthetic Sequence
tatcacacag

SEQ ID NO: 9295 - DNA, 10 bp, Artificial Sequence
  Synthetic Sequence
tatactcaag

SEQ ID NO: 9296 - DNA, 10 bp, Artificial Sequence
  Synthetic Sequence
cccgccaaag

SEQ ID NO: 9297 - DNA, 10 bp, Artificial Sequence
  Synthetic Sequence
gcgagggata

SEQ ID NO: 9298 - DNA, 10 bp, Artificial Sequence
  Synthetic Sequence
agcgccggtt

SEQ ID NO: 9299 - DNA, 10 bp, Artificial Sequence
  Synthetic Sequence
ttactcttat

SEQ ID NO: 9300 - DNA, 10 bp, Artificial Sequence
  Synthetic Sequence
ccaacacccg

SEQ ID NO: 9301 - DNA, 10 bp, Artificial Sequence
  Synthetic Sequence
tcgagcgtca

SEQ ID NO: 9302 - DNA, 10 bp, Artificial Sequence
  Synthetic Sequence
tccctccact

SEQ ID NO: 9303 - DNA, 10 bp, Artificial Sequence
  Synthetic Sequence
gtgtcaccgg

SEQ ID NO: 9304 - DNA, 10 bp, Artificial Sequence
  Synthetic Sequence
ccttgtggga

SEQ ID NO: 9305 - DNA, 10 bp, Artificial Sequence
  Synthetic Sequence
actatagcat

SEQ ID NO: 9306 - DNA, 10 bp, Artificial Sequence
  Synthetic Sequence
acacttagct

SEQ ID NO: 9307 - DNA, 10 bp, Artificial Sequence
  Synthetic Sequence
cgttctcgta

SEQ ID NO: 9308 - DNA, 10 bp, Artificial Sequence
  Synthetic Sequence
tgggaaatcg

SEQ ID NO: 9309 - DNA, 10 bp, Artificial Sequence
  Synthetic Sequence
aaaggttacc

SEQ ID NO: 9310 - DNA, 10 bp, Artificial Sequence
  Synthetic Sequence
attctttgca

SEQ ID NO: 9311 - DNA, 10 bp, Artificial Sequence
  Synthetic Sequence
atcaaacctg

SEQ ID NO: 9312 - DNA, 10 bp, Artificial Sequence
  Synthetic Sequence
ataacagtgc

SEQ ID NO: 9313 - DNA, 10 bp, Artificial Sequence
  Synthetic Sequence
cagcatattg

SEQ ID NO: 9314 - DNA, 10 bp, Artificial Sequence
  Synthetic Sequence
ctcggctctt

SEQ ID NO: 9315 - DNA, 10 bp, Artificial Sequence
  Synthetic Sequence
attcgtctcc

SEQ ID NO: 9316 - DNA, 10 bp, Artificial Sequence
  Synthetic Sequence
ttatattgag

SEQ ID NO: 9317 - DNA, 10 bp, Artificial Sequence
  Synthetic Sequence
gaacggttta

SEQ ID NO: 9318 - DNA, 10 bp, Artificial Sequence
  Synthetic Sequence
gagaacgcat

SEQ ID NO: 9319 - DNA, 10 bp, Artificial Sequence
  Synthetic Sequence
ctcgcacgca

SEQ ID NO: 9320 - DNA, 10 bp, Artificial Sequence
  Synthetic Sequence
ttaagcgctg

SEQ ID NO: 9321 - DNA, 10 bp, Artificial Sequence
  Synthetic Sequence
ggcaagtggg

SEQ ID NO: 9322 - DNA, 10 bp, Artificial Sequence
  Synthetic Sequence
tctcgacatc

SEQ ID NO: 9323 - DNA, 10 bp, Artificial Sequence
  Synthetic Sequence
tttcagatgg

SEQ ID NO: 9324 - DNA, 10 bp, Artificial Sequence
  Synthetic Sequence
ttcccagtcc

SEQ ID NO: 9325 - DNA, 10 bp, Artificial Sequence
  Synthetic Sequence
tcagtaccga

SEQ ID NO: 9326 - DNA, 10 bp, Artificial Sequence
  Synthetic Sequence
ctgcataata

SEQ ID NO: 9327 - DNA, 10 bp, Artificial Sequence
  Synthetic Sequence
tcagtcgagg

SEQ ID NO: 9328 - DNA, 10 bp, Artificial Sequence
  Synthetic Sequence
gtggtacagt

SEQ ID NO: 9329 - DNA, 10 bp, Artificial Sequence
  Synthetic Sequence
tagggaaggc

SEQ ID NO: 9330 - DNA, 10 bp, Artificial Sequence
  Synthetic Sequence
atctagtgga

SEQ ID NO: 9331 - DNA, 10 bp, Artificial Sequence
  Synthetic Sequence
actcgcccac

SEQ ID NO: 9332 - DNA, 10 bp, Artificial Sequence
  Synthetic Sequence
actcacatct

SEQ ID NO: 9333 - DNA, 10 bp, Artificial Sequence
  Synthetic Sequence
agcggctagg

SEQ ID NO: 9334 - DNA, 10 bp, Artificial Sequence
  Synthetic Sequence
atcgaacgcg

SEQ ID NO: 9335 - DNA, 10 bp, Artificial Sequence
  Synthetic Sequence
agactaagag

SEQ ID NO: 9336 - DNA, 10 bp, Artificial Sequence
  Synthetic Sequence
gggcgaaaga

SEQ ID NO: 9337 - DNA, 10 bp, Artificial Sequence
  Synthetic Sequence
ctaccctctg

SEQ ID NO: 9338 - DNA, 10 bp, Artificial Sequence
  Synthetic Sequence
actcagtagt

SEQ ID NO: 9339 - DNA, 10 bp, Artificial Sequence
  Synthetic Sequence
gtaagacggt

SEQ ID NO: 9340 - DNA, 10 bp, Artificial Sequence
  Synthetic Sequence
ataaagctag

SEQ ID NO: 9341 - DNA, 10 bp, Artificial Sequence
  Synthetic Sequence
gttgtgcggc

SEQ ID NO: 9342 - DNA, 10 bp, Artificial Sequence
  Synthetic Sequence
attagcactt

SEQ ID NO: 9343 - DNA, 10 bp, Artificial Sequence
  Synthetic Sequence
cacaaggaaa

SEQ ID NO: 9344 - DNA, 10 bp, Artificial Sequence
  Synthetic Sequence
ccatgacgcc

SEQ ID NO: 9345 - DNA, 10 bp, Artificial Sequence
  Synthetic Sequence
attaaccaat

SEQ ID NO: 9346 - DNA, 10 bp, Artificial Sequence
  Synthetic Sequence
acgattcgaa

SEQ ID NO: 9347 - DNA, 10 bp, Artificial Sequence
  Synthetic Sequence
aggcagcgaa

SEQ ID NO: 9348 - DNA, 10 bp, Artificial Sequence
  Synthetic Sequence
ttgcggtcca

SEQ ID NO: 9349 - DNA, 10 bp, Artificial Sequence
  Synthetic Sequence
gagttactag

SEQ ID NO: 9350 - DNA, 10 bp, Artificial Sequence
  Synthetic Sequence
cccgggcata

SEQ ID NO: 9351 - DNA, 10 bp, Artificial Sequence
  Synthetic Sequence
cccacgacta

SEQ ID NO: 9352 - DNA, 10 bp, Artificial Sequence
  Synthetic Sequence
ataatcccta

SEQ ID NO: 9353 - DNA, 10 bp, Artificial Sequence
  Synthetic Sequence
taaccgcgcc

SEQ ID NO: 9354 - DNA, 10 bp, Artificial Sequence
  Synthetic Sequence
acgtcagatg

SEQ ID NO: 9355 - DNA, 10 bp, Artificial Sequence
  Synthetic Sequence
catgcagcgg

SEQ ID NO: 9356 - DNA, 10 bp, Artificial Sequence
  Synthetic Sequence
ctgtcgtact

SEQ ID NO: 9357 - DNA, 10 bp, Artificial Sequence
  Synthetic Sequence
aacgtagcgc

SEQ ID NO: 9358 - DNA, 10 bp, Artificial Sequence
  Synthetic Sequence
atcgcccacg

SEQ ID NO: 9359 - DNA, 10 bp, Artificial Sequence
  Synthetic Sequence
cgcatctggt

SEQ ID NO: 9360 - DNA, 10 bp, Artificial Sequence
  Synthetic Sequence
gagttggtgg

SEQ ID NO: 9361 - DNA, 10 bp, Artificial Sequence
  Synthetic Sequence
actgggccgt

SEQ ID NO: 9362 - DNA, 10 bp, Artificial Sequence
  Synthetic Sequence
gactcatttg

SEQ ID NO: 9363 - DNA, 10 bp, Artificial Sequence
  Synthetic Sequence
agcttctagt

SEQ ID NO: 9364 - DNA, 10 bp, Artificial Sequence
  Synthetic Sequence
acgtgatggg

SEQ ID NO: 9365 - DNA, 10 bp, Artificial Sequence
  Synthetic Sequence
gccaggaact

SEQ ID NO: 9366 - DNA, 10 bp, Artificial Sequence
  Synthetic Sequence
aagtatggtc

SEQ ID NO: 9367 - DNA, 10 bp, Artificial Sequence
  Synthetic Sequence
ggtggatgta

SEQ ID NO: 9368 - DNA, 10 bp, Artificial Sequence
  Synthetic Sequence
tccgcacaaa

SEQ ID NO: 9369 - DNA, 10 bp, Artificial Sequence
  Synthetic Sequence
gtcgtgtttg

SEQ ID NO: 9370 - DNA, 10 bp, Artificial Sequence
  Synthetic Sequence
ccgaccctga

SEQ ID NO: 9371 - DNA, 10 bp, Artificial Sequence
  Synthetic Sequence
gacgcacagt

SEQ ID NO: 9372 - DNA, 10 bp, Artificial Sequence
  Synthetic Sequence
aagcaaagtg

SEQ ID NO: 9373 - DNA, 10 bp, Artificial Sequence
  Synthetic Sequence
agggttcaaa

SEQ ID NO: 9374 - DNA, 10 bp, Artificial Sequence
  Synthetic Sequence
acgagctagc

SEQ ID NO: 9375 - DNA, 10 bp, Artificial Sequence
  Synthetic Sequence
gacgttggga

SEQ ID NO: 9376 - DNA, 10 bp, Artificial Sequence
  Synthetic Sequence
cagacgcgat

SEQ ID NO: 9377 - DNA, 10 bp, Artificial Sequence
  Synthetic Sequence
ctaatctgtt

SEQ ID NO: 9378 - DNA, 10 bp, Artificial Sequence
  Synthetic Sequence
gttcttcgtt

SEQ ID NO: 9379 - DNA, 10 bp, Artificial Sequence
  Synthetic Sequence
ttataattgt

SEQ ID NO: 9380 - DNA, 10 bp, Artificial Sequence
  Synthetic Sequence
ttgcgtgtca

SEQ ID NO: 9381 - DNA, 10 bp, Artificial Sequence
  Synthetic Sequence
ttgctatggg

SEQ ID NO: 9382 - DNA, 10 bp, Artificial Sequence
  Synthetic Sequence
gatcgtatgc

SEQ ID NO: 9383 - DNA, 10 bp, Artificial Sequence
  Synthetic Sequence
gtggtaaacg

SEQ ID NO: 9384 - DNA, 10 bp, Artificial Sequence
  Synthetic Sequence
tgagacgacc

SEQ ID NO: 9385 - DNA, 10 bp, Artificial Sequence
  Synthetic Sequence
aagggacctg

SEQ ID NO: 9386 - DNA, 10 bp, Artificial Sequence
  Synthetic Sequence
ctctggatat

SEQ ID NO: 9387 - DNA, 10 bp, Artificial Sequence
  Synthetic Sequence
tctttatgcc

SEQ ID NO: 9388 - DNA, 10 bp, Artificial Sequence
  Synthetic Sequence
gttcggcgga

SEQ ID NO: 9389 - DNA, 10 bp, Artificial Sequence
  Synthetic Sequence
gttgaggcgg

SEQ ID NO: 9390 - DNA, 10 bp, Artificial Sequence
  Synthetic Sequence
ttgtagatga

SEQ ID NO: 9391 - DNA, 10 bp, Artificial Sequence
  Synthetic Sequence
gtactctctt

SEQ ID NO: 9392 - DNA, 10 bp, Artificial Sequence
  Synthetic Sequence
tagtttagtg

SEQ ID NO: 9393 - DNA, 10 bp, Artificial Sequence
  Synthetic Sequence
gatcgcactg

SEQ ID NO: 9394 - DNA, 10 bp, Artificial Sequence
  Synthetic Sequence
cgttaaattt

SEQ ID NO: 9395 - DNA, 10 bp, Artificial Sequence
  Synthetic Sequence
aattgctcca

SEQ ID NO: 9396 - DNA, 10 bp, Artificial Sequence
  Synthetic Sequence
gtttagtacg

SEQ ID NO: 9397 - DNA, 10 bp, Artificial Sequence
  Synthetic Sequence
atcagcatat

SEQ ID NO: 9398 - DNA, 10 bp, Artificial Sequence
  Synthetic Sequence
aattcacctg

SEQ ID NO: 9399 - DNA, 10 bp, Artificial Sequence
  Synthetic Sequence
taggtatact

SEQ ID NO: 9400 - DNA, 10 bp, Artificial Sequence
  Synthetic Sequence
gtgagaagta

SEQ ID NO: 9401 - DNA, 10 bp, Artificial Sequence
  Synthetic Sequence
gacctatccc

SEQ ID NO: 9402 - DNA, 10 bp, Artificial Sequence
  Synthetic Sequence
agcgcgcttg

SEQ ID NO: 9403 - DNA, 10 bp, Artificial Sequence
  Synthetic Sequence
gaagcttcac

SEQ ID NO: 9404 - DNA, 10 bp, Artificial Sequence
  Synthetic Sequence
gtattagcat

SEQ ID NO: 9405 - DNA, 10 bp, Artificial Sequence
  Synthetic Sequence
ttcgcgaaca

SEQ ID NO: 9406 - DNA, 10 bp, Artificial Sequence
  Synthetic Sequence
atgtcacaca

SEQ ID NO: 9407 - DNA, 10 bp, Artificial Sequence
  Synthetic Sequence
gatgcatggg

SEQ ID NO: 9408 - DNA, 10 bp, Artificial Sequence
  Synthetic Sequence
tcttagttcc

SEQ ID NO: 9409 - DNA, 10 bp, Artificial Sequence
  Synthetic Sequence
tagctgttct

SEQ ID NO: 9410 - DNA, 10 bp, Artificial Sequence
  Synthetic Sequence
acgggtcctc

SEQ ID NO: 9411 - DNA, 10 bp, Artificial Sequence
  Synthetic Sequence
ctgcaccgta

SEQ ID NO: 9412 - DNA, 10 bp, Artificial Sequence
  Synthetic Sequence
ggatccctga

SEQ ID NO: 9413 - DNA, 10 bp, Artificial Sequence
  Synthetic Sequence
cacactggat

SEQ ID NO: 9414 - DNA, 10 bp, Artificial Sequence
  Synthetic Sequence
gtcagggcta

SEQ ID NO: 9415 - DNA, 10 bp, Artificial Sequence
  Synthetic Sequence
ttacgggaaa

SEQ ID NO: 9416 - DNA, 10 bp, Artificial Sequence
  Synthetic Sequence
ataccgagtc

SEQ ID NO: 9417 - DNA, 10 bp, Artificial Sequence
  Synthetic Sequence
tcagcaaacc

SEQ ID NO: 9418 - DNA, 10 bp, Artificial Sequence
  Synthetic Sequence
agtatacgag

SEQ ID NO: 9419 - DNA, 10 bp, Artificial Sequence
  Synthetic Sequence
caccacagtc

SEQ ID NO: 9420 - DNA, 10 bp, Artificial Sequence
  Synthetic Sequence
gtctatttga

SEQ ID NO: 9421 - DNA, 10 bp, Artificial Sequence
  Synthetic Sequence
aacaatcgtt

SEQ ID NO: 9422 - DNA, 10 bp, Artificial Sequence
  Synthetic Sequence
cttggtgatc

SEQ ID NO: 9423 - DNA, 10 bp, Artificial Sequence
  Synthetic Sequence
tcgacaagta

SEQ ID NO: 9424 - DNA, 10 bp, Artificial Sequence
  Synthetic Sequence
cgatatgttt

SEQ ID NO: 9425 - DNA, 10 bp, Artificial Sequence
  Synthetic Sequence
gagtgccttt

SEQ ID NO: 9426 - DNA, 10 bp, Artificial Sequence
  Synthetic Sequence
ctcgtaccgc

SEQ ID NO: 9427 - DNA, 10 bp, Artificial Sequence
  Synthetic Sequence
aggctgtctc

SEQ ID NO: 9428 - DNA, 10 bp, Artificial Sequence
  Synthetic Sequence
cagatcgcaa

SEQ ID NO: 9429 - DNA, 10 bp, Artificial Sequence
  Synthetic Sequence
cagttagtgt

SEQ ID NO: 9430 - DNA, 10 bp, Artificial Sequence
  Synthetic Sequence
cagtcggcga

SEQ ID NO: 9431 - DNA, 10 bp, Artificial Sequence
  Synthetic Sequence
tcataccaac

SEQ ID NO: 9432 - DNA, 10 bp, Artificial Sequence
  Synthetic Sequence
taaatacagg

SEQ ID NO: 9433 - DNA, 10 bp, Artificial Sequence
  Synthetic Sequence
cgtagtagct

SEQ ID NO: 9434 - DNA, 10 bp, Artificial Sequence
  Synthetic Sequence
aatttgcgct

SEQ ID NO: 9435 - DNA, 10 bp, Artificial Sequence
  Synthetic Sequence
ttacgtatgc

SEQ ID NO: 9436 - DNA, 10 bp, Artificial Sequence
  Synthetic Sequence
aagaggaata

SEQ ID NO: 9437 - DNA, 10 bp, Artificial Sequence
  Synthetic Sequence
ggtttattcc

SEQ ID NO: 9438 - DNA, 10 bp, Artificial Sequence
  Synthetic Sequence
atgatcgttc

SEQ ID NO: 9439 - DNA, 10 bp, Artificial Sequence
  Synthetic Sequence
actgtcaggg

SEQ ID NO: 9440 - DNA, 10 bp, Artificial Sequence
  Synthetic Sequence
gcttcctacc

SEQ ID NO: 9441 - DNA, 10 bp, Artificial Sequence
  Synthetic Sequence
agacggacct

SEQ ID NO: 9442 - DNA, 10 bp, Artificial Sequence
  Synthetic Sequence
agcttcccac

SEQ ID NO: 9443 - DNA, 10 bp, Artificial Sequence
  Synthetic Sequence
atggacctgg

SEQ ID NO: 9444 - DNA, 10 bp, Artificial Sequence
  Synthetic Sequence
cgaggtaaat

SEQ ID NO: 9445 - DNA, 10 bp, Artificial Sequence
  Synthetic Sequence
cctcttaccg

SEQ ID NO: 9446 - DNA, 10 bp, Artificial Sequence
  Synthetic Sequence
cgcccggtat

SEQ ID NO: 9447 - DNA, 10 bp, Artificial Sequence
  Synthetic Sequence
actatttcgt

SEQ ID NO: 9448 - DNA, 10 bp, Artificial Sequence
  Synthetic Sequence
gagagtgcgg

SEQ ID NO: 9449 - DNA, 10 bp, Artificial Sequence
  Synthetic Sequence
gcggttggca

SEQ ID NO: 9450 - DNA, 10 bp, Artificial Sequence
  Synthetic Sequence
ttaacggttg

SEQ ID NO: 9451 - DNA, 10 bp, Artificial Sequence
  Synthetic Sequence
cgttgcatta

SEQ ID NO: 9452 - DNA, 10 bp, Artificial Sequence
  Synthetic Sequence
caggtagaaa

SEQ ID NO: 9453 - DNA, 10 bp, Artificial Sequence
  Synthetic Sequence
catgtgaatc

SEQ ID NO: 9454 - DNA, 10 bp, Artificial Sequence
  Synthetic Sequence
ggaaccgtgg

SEQ ID NO: 9455 - DNA, 10 bp, Artificial Sequence
  Synthetic Sequence
aagatcctat

SEQ ID NO: 9456 - DNA, 10 bp, Artificial Sequence
  Synthetic Sequence
actgctcact

SEQ ID NO: 9457 - DNA, 10 bp, Artificial Sequence
  Synthetic Sequence
gccaggtgga

SEQ ID NO: 9458 - DNA, 10 bp, Artificial Sequence
  Synthetic Sequence
agtgcagggc

SEQ ID NO: 9459 - DNA, 10 bp, Artificial Sequence
  Synthetic Sequence
tacggtggcc

SEQ ID NO: 9460 - DNA, 10 bp, Artificial Sequence
  Synthetic Sequence
ttcagtgcaa

SEQ ID NO: 9461 - DNA, 10 bp, Artificial Sequence
  Synthetic Sequence
attgagatcg

SEQ ID NO: 9462 - DNA, 10 bp, Artificial Sequence
  Synthetic Sequence
gatttgggag

SEQ ID NO: 9463 - DNA, 10 bp, Artificial Sequence
  Synthetic Sequence
gaattggcaa

SEQ ID NO: 9464 - DNA, 10 bp, Artificial Sequence
  Synthetic Sequence
tagcagaccc

SEQ ID NO: 9465 - DNA, 10 bp, Artificial Sequence
  Synthetic Sequence
gatacgaagt

SEQ ID NO: 9466 - DNA, 10 bp, Artificial Sequence
  Synthetic Sequence
aagcctgcca

SEQ ID NO: 9467 - DNA, 10 bp, Artificial Sequence
  Synthetic Sequence
ccaatgagta

SEQ ID NO: 9468 - DNA, 10 bp, Artificial Sequence
  Synthetic Sequence
ataagcggtc

SEQ ID NO: 9469 - DNA, 10 bp, Artificial Sequence
  Synthetic Sequence
taataagccc

SEQ ID NO: 9470 - DNA, 10 bp, Artificial Sequence
  Synthetic Sequence
gtgtcggttt

SEQ ID NO: 9471 - DNA, 10 bp, Artificial Sequence
  Synthetic Sequence
aacgaggcta

SEQ ID NO: 9472 - DNA, 10 bp, Artificial Sequence
  Synthetic Sequence
gactacgatc

SEQ ID NO: 9473 - DNA, 10 bp, Artificial Sequence
  Synthetic Sequence
cattgcctcc

SEQ ID NO: 9474 - DNA, 10 bp, Artificial Sequence
  Synthetic Sequence
ctgtttgggc

SEQ ID NO: 9475 - DNA, 10 bp, Artificial Sequence
  Synthetic Sequence
atagcgggtt

SEQ ID NO: 9476 - DNA, 10 bp, Artificial Sequence
  Synthetic Sequence
tttaagaccg

SEQ ID NO: 9477 - DNA, 10 bp, Artificial Sequence
  Synthetic Sequence
accacgccga

SEQ ID NO: 9478 - DNA, 10 bp, Artificial Sequence
  Synthetic Sequence
atatgcgtct

SEQ ID NO: 9479 - DNA, 10 bp, Artificial Sequence
  Synthetic Sequence
aaatggaggg

SEQ ID NO: 9480 - DNA, 10 bp, Artificial Sequence
  Synthetic Sequence
cactcagtag

SEQ ID NO: 9481 - DNA, 10 bp, Artificial Sequence
  Synthetic Sequence
caatttcact

SEQ ID NO: 9482 - DNA, 10 bp, Artificial Sequence
  Synthetic Sequence
agtcgtgagg

SEQ ID NO: 9483 - DNA, 10 bp, Artificial Sequence
  Synthetic Sequence
tacgagaggg

SEQ ID NO: 9484 - DNA, 10 bp, Artificial Sequence
  Synthetic Sequence
ttccggctct

SEQ ID NO: 9485 - DNA, 10 bp, Artificial Sequence
  Synthetic Sequence
aatttgctga

SEQ ID NO: 9486 - DNA, 10 bp, Artificial Sequence
  Synthetic Sequence
agtactgtgg

SEQ ID NO: 9487 - DNA, 10 bp, Artificial Sequence
  Synthetic Sequence
cggttcgttc

SEQ ID NO: 9488 - DNA, 10 bp, Artificial Sequence
  Synthetic Sequence
tatggaagaa

SEQ ID NO: 9489 - DNA, 10 bp, Artificial Sequence
  Synthetic Sequence
aacagagctg

SEQ ID NO: 9490 - DNA, 10 bp, Artificial Sequence
  Synthetic Sequence
tagtgcgtaa

SEQ ID NO: 9491 - DNA, 10 bp, Artificial Sequence
  Synthetic Sequence
agagtgaaat

SEQ ID NO: 9492 - DNA, 10 bp, Artificial Sequence
  Synthetic Sequence
gctatgtacc

SEQ ID NO: 9493 - DNA, 10 bp, Artificial Sequence
  Synthetic Sequence
gagctagctc

SEQ ID NO: 9494 - DNA, 10 bp, Artificial Sequence
  Synthetic Sequence
ctccgtgctt

SEQ ID NO: 9495 - DNA, 10 bp, Artificial Sequence
  Synthetic Sequence
caccttcacg

SEQ ID NO: 9496 - DNA, 10 bp, Artificial Sequence
  Synthetic Sequence
taactgacgt

SEQ ID NO: 9497 - DNA, 10 bp, Artificial Sequence
  Synthetic Sequence
tcgaagtcag

SEQ ID NO: 9498 - DNA, 10 bp, Artificial Sequence
  Synthetic Sequence
cgggaggttt

SEQ ID NO: 9499 - DNA, 10 bp, Artificial Sequence
  Synthetic Sequence
tgccacgctg

SEQ ID NO: 9500 - DNA, 10 bp, Artificial Sequence
  Synthetic Sequence
tcaacgccta

SEQ ID NO: 9501 - DNA, 10 bp, Artificial Sequence
  Synthetic Sequence
tttcagctcc

SEQ ID NO: 9502 - DNA, 10 bp, Artificial Sequence
  Synthetic Sequence
gtttctatcc

SEQ ID NO: 9503 - DNA, 10 bp, Artificial Sequence
  Synthetic Sequence
tacccgtgcg

SEQ ID NO: 9504 - DNA, 10 bp, Artificial Sequence
  Synthetic Sequence
acgcctattc

SEQ ID NO: 9505 - DNA, 10 bp, Artificial Sequence
  Synthetic Sequence
tcctcgtata

SEQ ID NO: 9506 - DNA, 10 bp, Artificial Sequence
  Synthetic Sequence
gtaaaggcca

SEQ ID NO: 9507 - DNA, 10 bp, Artificial Sequence
  Synthetic Sequence
cgaatatcgt

SEQ ID NO: 9508 - DNA, 10 bp, Artificial Sequence
  Synthetic Sequence
tagggcacac

SEQ ID NO: 9509 - DNA, 10 bp, Artificial Sequence
  Synthetic Sequence
ccagcctgtt

SEQ ID NO: 9510 - DNA, 10 bp, Artificial Sequence
  Synthetic Sequence
ctcgaaacgg

SEQ ID NO: 9511 - DNA, 10 bp, Artificial Sequence
  Synthetic Sequence
ctgttgaatg

SEQ ID NO: 9512 - DNA, 10 bp, Artificial Sequence
  Synthetic Sequence
tttctgtgac

SEQ ID NO: 9513 - DNA, 10 bp, Artificial Sequence
  Synthetic Sequence
tgcagggttt

SEQ ID NO: 9514 - DNA, 10 bp, Artificial Sequence
  Synthetic Sequence
gtcagttcac

SEQ ID NO: 9515 - DNA, 10 bp, Artificial Sequence
  Synthetic Sequence
ttctttccct

SEQ ID NO: 9516 - DNA, 10 bp, Artificial Sequence
  Synthetic Sequence
gcagtggatc

SEQ ID NO: 9517 - DNA, 10 bp, Artificial Sequence
  Synthetic Sequence
aatcaggact

SEQ ID NO: 9518 - DNA, 10 bp, Artificial Sequence
  Synthetic Sequence
gctgacctca

SEQ ID NO: 9519 - DNA, 10 bp, Artificial Sequence
  Synthetic Sequence
gggcaagagt

SEQ ID NO: 9520 - DNA, 10 bp, Artificial Sequence
  Synthetic Sequence
atcggacgtc

SEQ ID NO: 9521 - DNA, 10 bp, Artificial Sequence
  Synthetic Sequence
ggtaacgggt

SEQ ID NO: 9522 - DNA, 10 bp, Artificial Sequence
  Synthetic Sequence
gatacctcca

SEQ ID NO: 9523 - DNA, 10 bp, Artificial Sequence
  Synthetic Sequence
atactgaaag

SEQ ID NO: 9524 - DNA, 10 bp, Artificial Sequence
  Synthetic Sequence
ggctttcgtt

SEQ ID NO: 9525 - DNA, 10 bp, Artificial Sequence
  Synthetic Sequence
cctagtttca

SEQ ID NO: 9526 - DNA, 10 bp, Artificial Sequence
  Synthetic Sequence
aatatatcct

SEQ ID NO: 9527 - DNA, 10 bp, Artificial Sequence
  Synthetic Sequence
tctgtgtaat

SEQ ID NO: 9528 - DNA, 10 bp, Artificial Sequence
  Synthetic Sequence
ctcgcgcgtt

SEQ ID NO: 9529 - DNA, 10 bp, Artificial Sequence
  Synthetic Sequence
ggctccgcta

SEQ ID NO: 9530 - DNA, 10 bp, Artificial Sequence
  Synthetic Sequence
gagggacttc

SEQ ID NO: 9531 - DNA, 10 bp, Artificial Sequence
  Synthetic Sequence
ctattaggcc

SEQ ID NO: 9532 - DNA, 10 bp, Artificial Sequence
  Synthetic Sequence
atcatcgatg

SEQ ID NO: 9533 - DNA, 10 bp, Artificial Sequence
  Synthetic Sequence
atatggtgcg

SEQ ID NO: 9534 - DNA, 10 bp, Artificial Sequence
  Synthetic Sequence
atcgtacggt

SEQ ID NO: 9535 - DNA, 10 bp, Artificial Sequence
  Synthetic Sequence
gtggctccga

SEQ ID NO: 9536 - DNA, 10 bp, Artificial Sequence
  Synthetic Sequence
gtggccttcg

SEQ ID NO: 9537 - DNA, 10 bp, Artificial Sequence
  Synthetic Sequence
gacaacacct

SEQ ID NO: 9538 - DNA, 10 bp, Artificial Sequence
  Synthetic Sequence
aatacgactg

SEQ ID NO: 9539 - DNA, 10 bp, Artificial Sequence
  Synthetic Sequence
gcaacccatc

SEQ ID NO: 9540 - DNA, 10 bp, Artificial Sequence
  Synthetic Sequence
ggcccatgaa

SEQ ID NO: 9541 - DNA, 10 bp, Artificial Sequence
  Synthetic Sequence
tcagatattc

SEQ ID NO: 9542 - DNA, 10 bp, Artificial Sequence
  Synthetic Sequence
attccaagag

SEQ ID NO: 9543 - DNA, 10 bp, Artificial Sequence
  Synthetic Sequence
cgtgactctc

SEQ ID NO: 9544 - DNA, 10 bp, Artificial Sequence
  Synthetic Sequence
ttctggagct

SEQ ID NO: 9545 - DNA, 10 bp, Artificial Sequence
  Synthetic Sequence
atgcgctgtg

SEQ ID NO: 9546 - DNA, 10 bp, Artificial Sequence
  Synthetic Sequence
gcggacgtag

SEQ ID NO: 9547 - DNA, 10 bp, Artificial Sequence
  Synthetic Sequence
ccgggcgaaa

SEQ ID NO: 9548 - DNA, 10 bp, Artificial Sequence
  Synthetic Sequence
ggtaatatat

SEQ ID NO: 9549 - DNA, 10 bp, Artificial Sequence
  Synthetic Sequence
tcccacccgt

SEQ ID NO: 9550 - DNA, 10 bp, Artificial Sequence
  Synthetic Sequence
ctcggtacag

SEQ ID NO: 9551 - DNA, 10 bp, Artificial Sequence
  Synthetic Sequence
tgcccaccaa

SEQ ID NO: 9552 - DNA, 10 bp, Artificial Sequence
  Synthetic Sequence
ggcagagatc

SEQ ID NO: 9553 - DNA, 10 bp, Artificial Sequence
  Synthetic Sequence
gttagcccgg

SEQ ID NO: 9554 - DNA, 10 bp, Artificial Sequence
  Synthetic Sequence
cggtcggctt

SEQ ID NO: 9555 - DNA, 10 bp, Artificial Sequence
  Synthetic Sequence
gaatagtcga

SEQ ID NO: 9556 - DNA, 10 bp, Artificial Sequence
  Synthetic Sequence
ttgcaagtac

SEQ ID NO: 9557 - DNA, 10 bp, Artificial Sequence
  Synthetic Sequence
cataactcgc

SEQ ID NO: 9558 - DNA, 10 bp, Artificial Sequence
  Synthetic Sequence
gctggactaa

SEQ ID NO: 9559 - DNA, 10 bp, Artificial Sequence
  Synthetic Sequence
gcgtcgtatt

SEQ ID NO: 9560 - DNA, 10 bp, Artificial Sequence
  Synthetic Sequence
aacccattta

SEQ ID NO: 9561 - DNA, 10 bp, Artificial Sequence
  Synthetic Sequence
tagaggccat

SEQ ID NO: 9562 - DNA, 10 bp, Artificial Sequence
  Synthetic Sequence
gctcgcttat

SEQ ID NO: 9563 - DNA, 10 bp, Artificial Sequence
  Synthetic Sequence
ataaagcagt

SEQ ID NO: 9564 - DNA, 10 bp, Artificial Sequence
  Synthetic Sequence
tctcatgagg

SEQ ID NO: 9565 - DNA, 10 bp, Artificial Sequence
  Synthetic Sequence
gcaccgctag

SEQ ID NO: 9566 - DNA, 10 bp, Artificial Sequence
  Synthetic Sequence
cgagggctgt

SEQ ID NO: 9567 - DNA, 10 bp, Artificial Sequence
  Synthetic Sequence
taaagggaca

SEQ ID NO: 9568 - DNA, 10 bp, Artificial Sequence
  Synthetic Sequence
tggagtagga

SEQ ID NO: 9569 - DNA, 10 bp, Artificial Sequence
  Synthetic Sequence
tgtacgactt

SEQ ID NO: 9570 - DNA, 10 bp, Artificial Sequence
  Synthetic Sequence
catggcgcac

SEQ ID NO: 9571 - DNA, 10 bp, Artificial Sequence
  Synthetic Sequence
agtcaggccc

SEQ ID NO: 9572 - DNA, 10 bp, Artificial Sequence
  Synthetic Sequence
acatcgcgcc

SEQ ID NO: 9573 - DNA, 10 bp, Artificial Sequence
  Synthetic Sequence
taccgttcca

SEQ ID NO: 9574 - DNA, 10 bp, Artificial Sequence
  Synthetic Sequence
tgccaacgtt

SEQ ID NO: 9575 - DNA, 10 bp, Artificial Sequence
  Synthetic Sequence
tccgagcact

SEQ ID NO: 9576 - DNA, 10 bp, Artificial Sequence
  Synthetic Sequence
tagtctcttc

SEQ ID NO: 9577 - DNA, 10 bp, Artificial Sequence
  Synthetic Sequence
tgagggtagc

SEQ ID NO: 9578 - DNA, 10 bp, Artificial Sequence
  Synthetic Sequence
cttcagtcac

SEQ ID NO: 9579 - DNA, 10 bp, Artificial Sequence
  Synthetic Sequence
tgcatccgct

SEQ ID NO: 9580 - DNA, 10 bp, Artificial Sequence
  Synthetic Sequence
acgcaatgat

SEQ ID NO: 9581 - DNA, 10 bp, Artificial Sequence
  Synthetic Sequence
gcaatagaga

SEQ ID NO: 9582 - DNA, 10 bp, Artificial Sequence
  Synthetic Sequence
gccggtcttg

SEQ ID NO: 9583 - DNA, 10 bp, Artificial Sequence
  Synthetic Sequence
ggaaattcaa

SEQ ID NO: 9584 - DNA, 10 bp, Artificial Sequence
  Synthetic Sequence
caacgtttgg

SEQ ID NO: 9585 - DNA, 10 bp, Artificial Sequence
  Synthetic Sequence
tagtgttctg

SEQ ID NO: 9586 - DNA, 10 bp, Artificial Sequence
  Synthetic Sequence
tttgtgattc

SEQ ID NO: 9587 - DNA, 10 bp, Artificial Sequence
  Synthetic Sequence
gccggatcac

SEQ ID NO: 9588 - DNA, 10 bp, Artificial Sequence
  Synthetic Sequence
gccacatgtg

SEQ ID NO: 9589 - DNA, 10 bp, Artificial Sequence
  Synthetic Sequence
aagaacattg

SEQ ID NO: 9590 - DNA, 10 bp, Artificial Sequence
  Synthetic Sequence
cttgccgata

SEQ ID NO: 9591 - DNA, 10 bp, Artificial Sequence
  Synthetic Sequence
ggacaaggga

SEQ ID NO: 9592 - DNA, 10 bp, Artificial Sequence
  Synthetic Sequence
agctaccttt

SEQ ID NO: 9593 - DNA, 10 bp, Artificial Sequence
  Synthetic Sequence
tcatgcgcga

SEQ ID NO: 9594 - DNA, 10 bp, Artificial Sequence
  Synthetic Sequence
gccaactcgc

SEQ ID NO: 9595 - DNA, 10 bp, Artificial Sequence
  Synthetic Sequence
atgcttacgt

SEQ ID NO: 9596 - DNA, 10 bp, Artificial Sequence
  Synthetic Sequence
agagagagcg

SEQ ID NO: 9597 - DNA, 10 bp, Artificial Sequence
  Synthetic Sequence
gagcagggct

SEQ ID NO: 9598 - DNA, 10 bp, Artificial Sequence
  Synthetic Sequence
gctctgtcct

SEQ ID NO: 9599 - DNA, 10 bp, Artificial Sequence
  Synthetic Sequence
tggtacgcgg

SEQ ID NO: 9600 - DNA, 10 bp, Artificial Sequence
  Synthetic Sequence
ctacaaagca

SEQ ID NO: 9601 - DNA, 10 bp, Artificial Sequence
  Synthetic Sequence
gtcgcaaggg

SEQ ID NO: 9602 - DNA, 10 bp, Artificial Sequence
  Synthetic Sequence
tctaatctat

SEQ ID NO: 9603 - DNA, 10 bp, Artificial Sequence
  Synthetic Sequence
ccaataagat

SEQ ID NO: 9604 - DNA, 10 bp, Artificial Sequence
  Synthetic Sequence
ggacgaaacc

SEQ ID NO: 9605 - DNA, 10 bp, Artificial Sequence
  Synthetic Sequence
caccgcgaca

SEQ ID NO: 9606 - DNA, 10 bp, Artificial Sequence
  Synthetic Sequence
cctctagcca

SEQ ID NO: 9607 - DNA, 10 bp, Artificial Sequence
  Synthetic Sequence
ccgactatgc

SEQ ID NO: 9608 - DNA, 10 bp, Artificial Sequence
  Synthetic Sequence
gagaaaccca

SEQ ID NO: 9609 - DNA, 10 bp, Artificial Sequence
  Synthetic Sequence
aaggatatga

SEQ ID NO: 9610 - DNA, 10 bp, Artificial Sequence
  Synthetic Sequence
atcgccatca

SEQ ID NO: 9611 - DNA, 10 bp, Artificial Sequence
  Synthetic Sequence
tgcaccagga

SEQ ID NO: 9612 - DNA, 10 bp, Artificial Sequence
  Synthetic Sequence
gtgccgtgag

SEQ ID NO: 9613 - DNA, 10 bp, Artificial Sequence
  Synthetic Sequence
atactcccgc

SEQ ID NO: 9614 - DNA, 10 bp, Artificial Sequence
  Synthetic Sequence
ggtatgatct

SEQ ID NO: 9615 - DNA, 10 bp, Artificial Sequence
  Synthetic Sequence
ctgagttgta

SEQ ID NO: 9616 - DNA, 10 bp, Artificial Sequence
  Synthetic Sequence
tgctcaatgg

SEQ ID NO: 9617 - DNA, 10 bp, Artificial Sequence
  Synthetic Sequence
agttatatgg

SEQ ID NO: 9618 - DNA, 10 bp, Artificial Sequence
  Synthetic Sequence
ttggatgggc

SEQ ID NO: 9619 - DNA, 10 bp, Artificial Sequence
  Synthetic Sequence
ctaggcaacg

SEQ ID NO: 9620 - DNA, 10 bp, Artificial Sequence
  Synthetic Sequence
ccattctcca

SEQ ID NO: 9621 - DNA, 10 bp, Artificial Sequence
  Synthetic Sequence
aacctttggg

SEQ ID NO: 9622 - DNA, 10 bp, Artificial Sequence
  Synthetic Sequence
gtttgttgat

SEQ ID NO: 9623 - DNA, 10 bp, Artificial Sequence
  Synthetic Sequence
ggcatcgagg

SEQ ID NO: 9624 - DNA, 10 bp, Artificial Sequence
  Synthetic Sequence
cgtactaagc

SEQ ID NO: 9625 - DNA, 10 bp, Artificial Sequence
  Synthetic Sequence
acaagagggc

SEQ ID NO: 9626 - DNA, 10 bp, Artificial Sequence
  Synthetic Sequence
agcttgccct

SEQ ID NO: 9627 - DNA, 10 bp, Artificial Sequence
  Synthetic Sequence
tatatcgggt

SEQ ID NO: 9628 - DNA, 10 bp, Artificial Sequence
  Synthetic Sequence
ttcccaatta

SEQ ID NO: 9629 - DNA, 10 bp, Artificial Sequence
  Synthetic Sequence
atagttacaa

SEQ ID NO: 9630 - DNA, 10 bp, Artificial Sequence
  Synthetic Sequence
atgccggaag

SEQ ID NO: 9631 - DNA, 10 bp, Artificial Sequence
  Synthetic Sequence
tgaccggcgt

SEQ ID NO: 9632 - DNA, 10 bp, Artificial Sequence
  Synthetic Sequence
gggtaagacg

SEQ ID NO: 9633 - DNA, 10 bp, Artificial Sequence
  Synthetic Sequence
gcgctttgcc

SEQ ID NO: 9634 - DNA, 10 bp, Artificial Sequence
  Synthetic Sequence
accctacgaa

SEQ ID NO: 9635 - DNA, 10 bp, Artificial Sequence
  Synthetic Sequence
acctggtccg

SEQ ID NO: 9636 - DNA, 10 bp, Artificial Sequence
  Synthetic Sequence
agctgaacac

SEQ ID NO: 9637 - DNA, 10 bp, Artificial Sequence
  Synthetic Sequence
cggtaccagg

SEQ ID NO: 9638 - DNA, 10 bp, Artificial Sequence
  Synthetic Sequence
acccgttgca

SEQ ID NO: 9639 - DNA, 10 bp, Artificial Sequence
  Synthetic Sequence
taagaagaaa

SEQ ID NO: 9640 - DNA, 10 bp, Artificial Sequence
  Synthetic Sequence
tacataagac

SEQ ID NO: 9641 - DNA, 10 bp, Artificial Sequence
  Synthetic Sequence
gagtgagata

SEQ ID NO: 9642 - DNA, 10 bp, Artificial Sequence
  Synthetic Sequence
gaccgtggct

SEQ ID NO: 9643 - DNA, 10 bp, Artificial Sequence
  Synthetic Sequence
ttaaggacgt

SEQ ID NO: 9644 - DNA, 10 bp, Artificial Sequence
  Synthetic Sequence
ctgagaagat

SEQ ID NO: 9645 - DNA, 10 bp, Artificial Sequence
  Synthetic Sequence
agtatcaccc

SEQ ID NO: 9646 - DNA, 10 bp, Artificial Sequence
  Synthetic Sequence
tcgtcccaag

SEQ ID NO: 9647 - DNA, 10 bp, Artificial Sequence
  Synthetic Sequence
tgctcaagac

SEQ ID NO: 9648 - DNA, 10 bp, Artificial Sequence
  Synthetic Sequence
accgtatata

SEQ ID NO: 9649 - DNA, 10 bp, Artificial Sequence
  Synthetic Sequence
tgtgccggct

SEQ ID NO: 9650 - DNA, 10 bp, Artificial Sequence
  Synthetic Sequence
tgtcaagagc

SEQ ID NO: 9651 - DNA, 10 bp, Artificial Sequence
  Synthetic Sequence
accggcgaca

SEQ ID NO: 9652 - DNA, 10 bp, Artificial Sequence
  Synthetic Sequence
taccttgcta

SEQ ID NO: 9653 - DNA, 10 bp, Artificial Sequence
  Synthetic Sequence
tgaccaacga

SEQ ID NO: 9654 - DNA, 10 bp, Artificial Sequence
  Synthetic Sequence
tatgaggtac

SEQ ID NO: 9655 - DNA, 10 bp, Artificial Sequence
  Synthetic Sequence
ttaacagtct

SEQ ID NO: 9656 - DNA, 10 bp, Artificial Sequence
  Synthetic Sequence
gacagtctga

SEQ ID NO: 9657 - DNA, 10 bp, Artificial Sequence
  Synthetic Sequence
gactaaattc

SEQ ID NO: 9658 - DNA, 10 bp, Artificial Sequence
  Synthetic Sequence
actattcgtt

SEQ ID NO: 9659 - DNA, 10 bp, Artificial Sequence
  Synthetic Sequence
tccgctgctc

SEQ ID NO: 9660 - DNA, 10 bp, Artificial Sequence
  Synthetic Sequence
acatttgaac

SEQ ID NO: 9661 - DNA, 10 bp, Artificial Sequence
  Synthetic Sequence
gggattattc

SEQ ID NO: 9662 - DNA, 10 bp, Artificial Sequence
  Synthetic Sequence
ggctctcagc

SEQ ID NO: 9663 - DNA, 10 bp, Artificial Sequence
  Synthetic Sequence
aatagctggg

SEQ ID NO: 9664 - DNA, 10 bp, Artificial Sequence
  Synthetic Sequence
tttgaatttg

SEQ ID NO: 9665 - DNA, 10 bp, Artificial Sequence
  Synthetic Sequence
ctgaggacgc

SEQ ID NO: 9666 - DNA, 10 bp, Artificial Sequence
  Synthetic Sequence
ctctccttgg

SEQ ID NO: 9667 - DNA, 10 bp, Artificial Sequence
  Synthetic Sequence
ccgtccaacg

SEQ ID NO: 9668 - DNA, 10 bp, Artificial Sequence
  Synthetic Sequence
aaccatctga

SEQ ID NO: 9669 - DNA, 10 bp, Artificial Sequence
  Synthetic Sequence
aacgcccatt

SEQ ID NO: 9670 - DNA, 10 bp, Artificial Sequence
  Synthetic Sequence
tttgggaaag

SEQ ID NO: 9671 - DNA, 10 bp, Artificial Sequence
  Synthetic Sequence
tttgttcgga

SEQ ID NO: 9672 - DNA, 10 bp, Artificial Sequence
  Synthetic Sequence
aatggcacgg

SEQ ID NO: 9673 - DNA, 10 bp, Artificial Sequence
  Synthetic Sequence
ccctaggtac

SEQ ID NO: 9674 - DNA, 10 bp, Artificial Sequence
  Synthetic Sequence
tacttaaagc

SEQ ID NO: 9675 - DNA, 10 bp, Artificial Sequence
  Synthetic Sequence
cagtctttat

SEQ ID NO: 9676 - DNA, 10 bp, Artificial Sequence
  Synthetic Sequence
tagaataaga

SEQ ID NO: 9677 - DNA, 10 bp, Artificial Sequence
  Synthetic Sequence
atgcttcgct

SEQ ID NO: 9678 - DNA, 10 bp, Artificial Sequence
  Synthetic Sequence
atgtccgagt

SEQ ID NO: 9679 - DNA, 10 bp, Artificial Sequence
  Synthetic Sequence
ctccgttaag

SEQ ID NO: 9680 - DNA, 10 bp, Artificial Sequence
  Synthetic Sequence
ttgagaacaa

SEQ ID NO: 9681 - DNA, 10 bp, Artificial Sequence
  Synthetic Sequence
gcactatcag

SEQ ID NO: 9682 - DNA, 10 bp, Artificial Sequence
  Synthetic Sequence
tggcgaggct

SEQ ID NO: 9683 - DNA, 10 bp, Artificial Sequence
  Synthetic Sequence
aaccctaaac

SEQ ID NO: 9684 - DNA, 10 bp, Artificial Sequence
  Synthetic Sequence
gcaactaatg

SEQ ID NO: 9685 - DNA, 10 bp, Artificial Sequence
  Synthetic Sequence
ctacattcgt

SEQ ID NO: 9686 - DNA, 10 bp, Artificial Sequence
  Synthetic Sequence
caacagcctg

SEQ ID NO: 9687 - DNA, 10 bp, Artificial Sequence
  Synthetic Sequence
cagaatatcc

SEQ ID NO: 9688 - DNA, 10 bp, Artificial Sequence
  Synthetic Sequence
tcatggctac

SEQ ID NO: 9689 - DNA, 10 bp, Artificial Sequence
  Synthetic Sequence
ccttggttgc

SEQ ID NO: 9690 - DNA, 10 bp, Artificial Sequence
  Synthetic Sequence
ggatcacctg

SEQ ID NO: 9691 - DNA, 10 bp, Artificial Sequence
  Synthetic Sequence
gaataataag

SEQ ID NO: 9692 - DNA, 10 bp, Artificial Sequence
  Synthetic Sequence
caactgaagc

SEQ ID NO: 9693 - DNA, 10 bp, Artificial Sequence
  Synthetic Sequence
aagaggtagt

SEQ ID NO: 9694 - DNA, 10 bp, Artificial Sequence
  Synthetic Sequence
caagtcagaa

SEQ ID NO: 9695 - DNA, 10 bp, Artificial Sequence
  Synthetic Sequence
gtgcttcacc

SEQ ID NO: 9696 - DNA, 10 bp, Artificial Sequence
  Synthetic Sequence
tgttagagcg

SEQ ID NO: 9697 - DNA, 10 bp, Artificial Sequence
  Synthetic Sequence
ggcagggtca

SEQ ID NO: 9698 - DNA, 10 bp, Artificial Sequence
  Synthetic Sequence
gcggtctcct

SEQ ID NO: 9699 - DNA, 10 bp, Artificial Sequence
  Synthetic Sequence
aaagtactat

SEQ ID NO: 9700 - DNA, 10 bp, Artificial Sequence
  Synthetic Sequence
agcttagcag

SEQ ID NO: 9701 - DNA, 10 bp, Artificial Sequence
  Synthetic Sequence
attaagaggg

SEQ ID NO: 9702 - DNA, 10 bp, Artificial Sequence
  Synthetic Sequence
agaagcctgt

SEQ ID NO: 9703 - DNA, 10 bp, Artificial Sequence
  Synthetic Sequence
cacacgctct

SEQ ID NO: 9704 - DNA, 10 bp, Artificial Sequence
  Synthetic Sequence
tatactcctc

SEQ ID NO: 9705 - DNA, 10 bp, Artificial Sequence
  Synthetic Sequence
cgtagttggg

SEQ ID NO: 9706 - DNA, 10 bp, Artificial Sequence
  Synthetic Sequence
gctgtggaag

SEQ ID NO: 9707 - DNA, 10 bp, Artificial Sequence
  Synthetic Sequence
tccggagacg

SEQ ID NO: 9708 - DNA, 10 bp, Artificial Sequence
  Synthetic Sequence
gccatgcatg

SEQ ID NO: 9709 - DNA, 10 bp, Artificial Sequence
  Synthetic Sequence
tagataggag

SEQ ID NO: 9710 - DNA, 10 bp, Artificial Sequence
  Synthetic Sequence
gggtatggca

SEQ ID NO: 9711 - DNA, 10 bp, Artificial Sequence
  Synthetic Sequence
agactacaaa

SEQ ID NO: 9712 - DNA, 10 bp, Artificial Sequence
  Synthetic Sequence
ctgttcctac

SEQ ID NO: 9713 - DNA, 10 bp, Artificial Sequence
  Synthetic Sequence
atctgttata

SEQ ID NO: 9714 - DNA, 10 bp, Artificial Sequence
  Synthetic Sequence
tagtccgatt

SEQ ID NO: 9715 - DNA, 10 bp, Artificial Sequence
  Synthetic Sequence
gcttgaattt

SEQ ID NO: 9716 - DNA, 10 bp, Artificial Sequence
  Synthetic Sequence
tttacgtcag

SEQ ID NO: 9717 - DNA, 10 bp, Artificial Sequence
  Synthetic Sequence
aaggttgacc

SEQ ID NO: 9718 - DNA, 10 bp, Artificial Sequence
  Synthetic Sequence
agttcatgga

SEQ ID NO: 9719 - DNA, 10 bp, Artificial Sequence
  Synthetic Sequence
ttgctacatt

SEQ ID NO: 9720 - DNA, 10 bp, Artificial Sequence
  Synthetic Sequence
gatcagacgg

SEQ ID NO: 9721 - DNA, 10 bp, Artificial Sequence
  Synthetic Sequence
taagggcaat

SEQ ID NO: 9722 - DNA, 10 bp, Artificial Sequence
  Synthetic Sequence
cttccagtac

SEQ ID NO: 9723 - DNA, 10 bp, Artificial Sequence
  Synthetic Sequence
ctttcgctgc

SEQ ID NO: 9724 - DNA, 10 bp, Artificial Sequence
  Synthetic Sequence
atggctgtga

SEQ ID NO: 9725 - DNA, 10 bp, Artificial Sequence
  Synthetic Sequence
ccgctctctc

SEQ ID NO: 9726 - DNA, 10 bp, Artificial Sequence
  Synthetic Sequence
gtacgacatc

SEQ ID NO: 9727 - DNA, 10 bp, Artificial Sequence
  Synthetic Sequence
taggcacggg

SEQ ID NO: 9728 - DNA, 10 bp, Artificial Sequence
  Synthetic Sequence
ggagcgatcc

SEQ ID NO: 9729 - DNA, 10 bp, Artificial Sequence
  Synthetic Sequence
tacgggacat

SEQ ID NO: 9730 - DNA, 10 bp, Artificial Sequence
  Synthetic Sequence
ccctagctca

SEQ ID NO: 9731 - DNA, 10 bp, Artificial Sequence
  Synthetic Sequence
tatctctcgc

SEQ ID NO: 9732 - DNA, 10 bp, Artificial Sequence
  Synthetic Sequence
caatcgaact

SEQ ID NO: 9733 - DNA, 10 bp, Artificial Sequence
  Synthetic Sequence
gttaggtata

SEQ ID NO: 9734 - DNA, 10 bp, Artificial Sequence
  Synthetic Sequence
atccatcagc

SEQ ID NO: 9735 - DNA, 10 bp, Artificial Sequence
  Synthetic Sequence
agattgcata

SEQ ID NO: 9736 - DNA, 10 bp, Artificial Sequence
  Synthetic Sequence
cgccgaggat

SEQ ID NO: 9737 - DNA, 10 bp, Artificial Sequence
  Synthetic Sequence
caacggtggt

SEQ ID NO: 9738 - DNA, 10 bp, Artificial Sequence
  Synthetic Sequence
acctcggtcc

SEQ ID NO: 9739 - DNA, 10 bp, Artificial Sequence
  Synthetic Sequence
aggatatttc

SEQ ID NO: 9740 - DNA, 10 bp, Artificial Sequence
  Synthetic Sequence
ttatctaaat

SEQ ID NO: 9741 - DNA, 10 bp, Artificial Sequence
  Synthetic Sequence
ctatacccta

SEQ ID NO: 9742 - DNA, 10 bp, Artificial Sequence
  Synthetic Sequence
tacacctgaa

SEQ ID NO: 9743 - DNA, 10 bp, Artificial Sequence
  Synthetic Sequence
acccgggatt

SEQ ID NO: 9744 - DNA, 10 bp, Artificial Sequence
  Synthetic Sequence
ttagtcccgg

SEQ ID NO: 9745 - DNA, 10 bp, Artificial Sequence
  Synthetic Sequence
ttgctcggct

SEQ ID NO: 9746 - DNA, 10 bp, Artificial Sequence
  Synthetic Sequence
ttgataatat

SEQ ID NO: 9747 - DNA, 10 bp, Artificial Sequence
  Synthetic Sequence
agcgtctctt

SEQ ID NO: 9748 - DNA, 10 bp, Artificial Sequence
  Synthetic Sequence
cgcttgttta

SEQ ID NO: 9749 - DNA, 10 bp, Artificial Sequence
  Synthetic Sequence
aaccggacta

SEQ ID NO: 9750 - DNA, 10 bp, Artificial Sequence
  Synthetic Sequence
gccagaatag

SEQ ID NO: 9751 - DNA, 10 bp, Artificial Sequence
  Synthetic Sequence
gatcgcgtac

SEQ ID NO: 9752 - DNA, 10 bp, Artificial Sequence
  Synthetic Sequence
gtaacggatc

SEQ ID NO: 9753 - DNA, 10 bp, Artificial Sequence
  Synthetic Sequence
agaacccata

SEQ ID NO: 9754 - DNA, 10 bp, Artificial Sequence
  Synthetic Sequence
cgcgttaacg

SEQ ID NO: 9755 - DNA, 10 bp, Artificial Sequence
  Synthetic Sequence
tccaaagcca

SEQ ID NO: 9756 - DNA, 10 bp, Artificial Sequence
  Synthetic Sequence
ccgaaccgtt

SEQ ID NO: 9757 - DNA, 10 bp, Artificial Sequence
  Synthetic Sequence
aagtcacgcc

SEQ ID NO: 9758 - DNA, 10 bp, Artificial Sequence
  Synthetic Sequence
cggtcagtgg

SEQ ID NO: 9759 - DNA, 10 bp, Artificial Sequence
  Synthetic Sequence
ccgactagct

SEQ ID NO: 9760 - DNA, 10 bp, Artificial Sequence
  Synthetic Sequence
cctccggctt

SEQ ID NO: 9761 - DNA, 10 bp, Artificial Sequence
  Synthetic Sequence
ctgtctagtt

SEQ ID NO: 9762 - DNA, 10 bp, Artificial Sequence
  Synthetic Sequence
taaggttgct

SEQ ID NO: 9763 - DNA, 10 bp, Artificial Sequence
  Synthetic Sequence
acctgcgaat

SEQ ID NO: 9764 - DNA, 10 bp, Artificial Sequence
  Synthetic Sequence
gcgcaaatac

SEQ ID NO: 9765 - DNA, 10 bp, Artificial Sequence
  Synthetic Sequence
gataggacta

SEQ ID NO: 9766 - DNA, 10 bp, Artificial Sequence
  Synthetic Sequence
ccggttccct

SEQ ID NO: 9767 - DNA, 10 bp, Artificial Sequence
  Synthetic Sequence
gctaaccctt

SEQ ID NO: 9768 - DNA, 10 bp, Artificial Sequence
  Synthetic Sequence
gatgtagcct

SEQ ID NO: 9769 - DNA, 10 bp, Artificial Sequence
  Synthetic Sequence
tcccatgccg

SEQ ID NO: 9770 - DNA, 10 bp, Artificial Sequence
  Synthetic Sequence
ccgagttagt

SEQ ID NO: 9771 - DNA, 10 bp, Artificial Sequence
  Synthetic Sequence
caaagctgag

SEQ ID NO: 9772 - DNA, 10 bp, Artificial Sequence
  Synthetic Sequence
agtgtcaatc

SEQ ID NO: 9773 - DNA, 10 bp, Artificial Sequence
  Synthetic Sequence
tccaccttga

SEQ ID NO: 9774 - DNA, 10 bp, Artificial Sequence
  Synthetic Sequence
tcggtcagcc

SEQ ID NO: 9775 - DNA, 10 bp, Artificial Sequence
  Synthetic Sequence
cgtatataaa

SEQ ID NO: 9776 - DNA, 10 bp, Artificial Sequence
  Synthetic Sequence
caatcggagc

SEQ ID NO: 9777 - DNA, 10 bp, Artificial Sequence
  Synthetic Sequence
ggttatttac

SEQ ID NO: 9778 - DNA, 10 bp, Artificial Sequence
  Synthetic Sequence
gtcagtaggt

SEQ ID NO: 9779 - DNA, 10 bp, Artificial Sequence
  Synthetic Sequence
ttcgcaggtg

SEQ ID NO: 9780 - DNA, 10 bp, Artificial Sequence
  Synthetic Sequence
tgagcaggat

SEQ ID NO: 9781 - DNA, 10 bp, Artificial Sequence
  Synthetic Sequence
ttaaatgcct

SEQ ID NO: 9782 - DNA, 10 bp, Artificial Sequence
  Synthetic Sequence
aaagcagacg

SEQ ID NO: 9783 - DNA, 10 bp, Artificial Sequence
  Synthetic Sequence
attataagaa

SEQ ID NO: 9784 - DNA, 10 bp, Artificial Sequence
  Synthetic Sequence
ttcgtctgat

SEQ ID NO: 9785 - DNA, 10 bp, Artificial Sequence
  Synthetic Sequence
cccgtccctt

SEQ ID NO: 9786 - DNA, 10 bp, Artificial Sequence
  Synthetic Sequence
ccggataact

SEQ ID NO: 9787 - DNA, 10 bp, Artificial Sequence
  Synthetic Sequence
gtcgagagtt

SEQ ID NO: 9788 - DNA, 10 bp, Artificial Sequence
  Synthetic Sequence
cttacggtat

SEQ ID NO: 9789 - DNA, 10 bp, Artificial Sequence
  Synthetic Sequence
atcctcttag

SEQ ID NO: 9790 - DNA, 10 bp, Artificial Sequence
  Synthetic Sequence
tgcgcaatct

SEQ ID NO: 9791 - DNA, 10 bp, Artificial Sequence
  Synthetic Sequence
ctaggtgtaa

SEQ ID NO: 9792 - DNA, 10 bp, Artificial Sequence
  Synthetic Sequence
catttagtac

SEQ ID NO: 9793 - DNA, 10 bp, Artificial Sequence
  Synthetic Sequence
aggttaagga

SEQ ID NO: 9794 - DNA, 10 bp, Artificial Sequence
  Synthetic Sequence
cataagtcct

SEQ ID NO: 9795 - DNA, 10 bp, Artificial Sequence
  Synthetic Sequence
cattgtcaga

SEQ ID NO: 9796 - DNA, 10 bp, Artificial Sequence
  Synthetic Sequence
gttccaccgt

SEQ ID NO: 9797 - DNA, 10 bp, Artificial Sequence
  Synthetic Sequence
ttgtcattct

SEQ ID NO: 9798 - DNA, 10 bp, Artificial Sequence
  Synthetic Sequence
gacatcacga

SEQ ID NO: 9799 - DNA, 10 bp, Artificial Sequence
  Synthetic Sequence
taagctgaag

SEQ ID NO: 9800 - DNA, 10 bp, Artificial Sequence
  Synthetic Sequence
tggaagtatc

SEQ ID NO: 9801 - DNA, 10 bp, Artificial Sequence
  Synthetic Sequence
gtgagcagcc

SEQ ID NO: 9802 - DNA, 10 bp, Artificial Sequence
  Synthetic Sequence
cttgcctcac

SEQ ID NO: 9803 - DNA, 10 bp, Artificial Sequence
  Synthetic Sequence
cataagccga

SEQ ID NO: 9804 - DNA, 10 bp, Artificial Sequence
  Synthetic Sequence
tctcccggga

SEQ ID NO: 9805 - DNA, 10 bp, Artificial Sequence
  Synthetic Sequence
tcagcgggtc

SEQ ID NO: 9806 - DNA, 10 bp, Artificial Sequence
  Synthetic Sequence
ttaggtacga

SEQ ID NO: 9807 - DNA, 10 bp, Artificial Sequence
  Synthetic Sequence
caaccgcaaa

SEQ ID NO: 9808 - DNA, 10 bp, Artificial Sequence
  Synthetic Sequence
cggaagagga

SEQ ID NO: 9809 - DNA, 10 bp, Artificial Sequence
  Synthetic Sequence
tcgccgtcct

SEQ ID NO: 9810 - DNA, 10 bp, Artificial Sequence
  Synthetic Sequence
gtgttctacc

SEQ ID NO: 9811 - DNA, 10 bp, Artificial Sequence
  Synthetic Sequence
gccattccca

SEQ ID NO: 9812 - DNA, 10 bp, Artificial Sequence
  Synthetic Sequence
gcaagtttgt

SEQ ID NO: 9813 - DNA, 10 bp, Artificial Sequence
  Synthetic Sequence
tcgcgcttga

SEQ ID NO: 9814 - DNA, 10 bp, Artificial Sequence
  Synthetic Sequence
ttggatgttt

SEQ ID NO: 9815 - DNA, 10 bp, Artificial Sequence
  Synthetic Sequence
atctgacagt

SEQ ID NO: 9816 - DNA, 10 bp, Artificial Sequence
  Synthetic Sequence
gaacatttcg

SEQ ID NO: 9817 - DNA, 10 bp, Artificial Sequence
  Synthetic Sequence
agcgacacgc

SEQ ID NO: 9818 - DNA, 10 bp, Artificial Sequence
  Synthetic Sequence
ccggacggat

SEQ ID NO: 9819 - DNA, 10 bp, Artificial Sequence
  Synthetic Sequence
gatagcaact

SEQ ID NO: 9820 - DNA, 10 bp, Artificial Sequence
  Synthetic Sequence
acgggaatgt

SEQ ID NO: 9821 - DNA, 10 bp, Artificial Sequence
  Synthetic Sequence
cgacgatctg

SEQ ID NO: 9822 - DNA, 10 bp, Artificial Sequence
  Synthetic Sequence
ggaccgtact

SEQ ID NO: 9823 - DNA, 10 bp, Artificial Sequence
  Synthetic Sequence
cctacagtga

SEQ ID NO: 9824 - DNA, 10 bp, Artificial Sequence
  Synthetic Sequence
gaatcaacat

SEQ ID NO: 9825 - DNA, 10 bp, Artificial Sequence
  Synthetic Sequence
atgttgtttg

SEQ ID NO: 9826 - DNA, 10 bp, Artificial Sequence
  Synthetic Sequence
ttactaccca

SEQ ID NO: 9827 - DNA, 10 bp, Artificial Sequence
  Synthetic Sequence
tgggccttgg

SEQ ID NO: 9828 - DNA, 10 bp, Artificial Sequence
  Synthetic Sequence
ttacattgta

SEQ ID NO: 9829 - DNA, 10 bp, Artificial Sequence
  Synthetic Sequence
gcatcaggtc

SEQ ID NO: 9830 - DNA, 10 bp, Artificial Sequence
  Synthetic Sequence
ggtcttcctg

SEQ ID NO: 9831 - DNA, 10 bp, Artificial Sequence
  Synthetic Sequence
tcaagtactg

SEQ ID NO: 9832 - DNA, 10 bp, Artificial Sequence
  Synthetic Sequence
atgaccagct

SEQ ID NO: 9833 - DNA, 10 bp, Artificial Sequence
  Synthetic Sequence
gtctgggcac

SEQ ID NO: 9834 - DNA, 10 bp, Artificial Sequence
  Synthetic Sequence
ctcaccaacc

SEQ ID NO: 9835 - DNA, 10 bp, Artificial Sequence
  Synthetic Sequence
ggatctgtta

SEQ ID NO: 9836 - DNA, 10 bp, Artificial Sequence
  Synthetic Sequence
gtgcccgatt

SEQ ID NO: 9837 - DNA, 10 bp, Artificial Sequence
  Synthetic Sequence
agccgtcttt

SEQ ID NO: 9838 - DNA, 10 bp, Artificial Sequence
  Synthetic Sequence
catgcataca

SEQ ID NO: 9839 - DNA, 10 bp, Artificial Sequence
  Synthetic Sequence
tgttggtgtc

SEQ ID NO: 9840 - DNA, 10 bp, Artificial Sequence
  Synthetic Sequence
atttagtgct

SEQ ID NO: 9841 - DNA, 10 bp, Artificial Sequence
  Synthetic Sequence
tcagcggcag

SEQ ID NO: 9842 - DNA, 10 bp, Artificial Sequence
  Synthetic Sequence
ctgtcttatc

SEQ ID NO: 9843 - DNA, 10 bp, Artificial Sequence
  Synthetic Sequence
cattcggctg

SEQ ID NO: 9844 - DNA, 10 bp, Artificial Sequence
  Synthetic Sequence
ggtagcaccg

SEQ ID NO: 9845 - DNA, 10 bp, Artificial Sequence
  Synthetic Sequence
tctacaagcg

SEQ ID NO: 9846 - DNA, 10 bp, Artificial Sequence
  Synthetic Sequence
ttgtcaggat

SEQ ID NO: 9847 - DNA, 10 bp, Artificial Sequence
  Synthetic Sequence
cacgctccca

SEQ ID NO: 9848 - DNA, 10 bp, Artificial Sequence
  Synthetic Sequence
atgtggtatt

SEQ ID NO: 9849 - DNA, 10 bp, Artificial Sequence
  Synthetic Sequence
cttatagttc

SEQ ID NO: 9850 - DNA, 10 bp, Artificial Sequence
  Synthetic Sequence
tcaagtcata

SEQ ID NO: 9851 - DNA, 10 bp, Artificial Sequence
  Synthetic Sequence
taatcttgga

SEQ ID NO: 9852 - DNA, 10 bp, Artificial Sequence
  Synthetic Sequence
cccgttgtcg

SEQ ID NO: 9853 - DNA, 10 bp, Artificial Sequence
  Synthetic Sequence
caaggcggtt

SEQ ID NO: 9854 - DNA, 10 bp, Artificial Sequence
  Synthetic Sequence
cgggctttag

SEQ ID NO: 9855 - DNA, 10 bp, Artificial Sequence
  Synthetic Sequence
gtagacccac

SEQ ID NO: 9856 - DNA, 10 bp, Artificial Sequence
  Synthetic Sequence
tatggctaga

SEQ ID NO: 9857 - DNA, 10 bp, Artificial Sequence
  Synthetic Sequence
gaccatccag

SEQ ID NO: 9858 - DNA, 10 bp, Artificial Sequence
  Synthetic Sequence
cggagctcat

SEQ ID NO: 9859 - DNA, 10 bp, Artificial Sequence
  Synthetic Sequence
taatctgtct

SEQ ID NO: 9860 - DNA, 10 bp, Artificial Sequence
  Synthetic Sequence
actcacggtg

SEQ ID NO: 9861 - DNA, 10 bp, Artificial Sequence
  Synthetic Sequence
tgtgaggaca

SEQ ID NO: 9862 - DNA, 10 bp, Artificial Sequence
  Synthetic Sequence
caacgttgta

SEQ ID NO: 9863 - DNA, 10 bp, Artificial Sequence
  Synthetic Sequence
taattccagc

SEQ ID NO: 9864 - DNA, 10 bp, Artificial Sequence
  Synthetic Sequence
ccctcgtgca

SEQ ID NO: 9865 - DNA, 10 bp, Artificial Sequence
  Synthetic Sequence
tagaagggta

SEQ ID NO: 9866 - DNA, 10 bp, Artificial Sequence
  Synthetic Sequence
ccctgacatg

SEQ ID NO: 9867 - DNA, 10 bp, Artificial Sequence
  Synthetic Sequence
ggtatcacat

SEQ ID NO: 9868 - DNA, 10 bp, Artificial Sequence
  Synthetic Sequence
gtgtggcgct

SEQ ID NO: 9869 - DNA, 10 bp, Artificial Sequence
  Synthetic Sequence
ctgaatgaag

SEQ ID NO: 9870 - DNA, 10 bp, Artificial Sequence
  Synthetic Sequence
gatccaccca

SEQ ID NO: 9871 - DNA, 10 bp, Artificial Sequence
  Synthetic Sequence
acattaatct

SEQ ID NO: 9872 - DNA, 10 bp, Artificial Sequence
  Synthetic Sequence
cctttggaga

SEQ ID NO: 9873 - DNA, 10 bp, Artificial Sequence
  Synthetic Sequence
ataaacgagg

SEQ ID NO: 9874 - DNA, 10 bp, Artificial Sequence
  Synthetic Sequence
cgtcacggta

SEQ ID NO: 9875 - DNA, 10 bp, Artificial Sequence
  Synthetic Sequence
aatgggagta

SEQ ID NO: 9876 - DNA, 10 bp, Artificial Sequence
  Synthetic Sequence
ggctgctatc

SEQ ID NO: 9877 - DNA, 10 bp, Artificial Sequence
  Synthetic Sequence
cggtatgcgt

SEQ ID NO: 9878 - DNA, 10 bp, Artificial Sequence
  Synthetic Sequence
ccttataaag

SEQ ID NO: 9879 - DNA, 10 bp, Artificial Sequence
  Synthetic Sequence
cggctggtct

SEQ ID NO: 9880 - DNA, 10 bp, Artificial Sequence
  Synthetic Sequence
taacatgatg

SEQ ID NO: 9881 - DNA, 10 bp, Artificial Sequence
  Synthetic Sequence
ataagttaga

SEQ ID NO: 9882 - DNA, 10 bp, Artificial Sequence
  Synthetic Sequence
cccttcagca

SEQ ID NO: 9883 - DNA, 10 bp, Artificial Sequence
  Synthetic Sequence
tagttccgat

SEQ ID NO: 9884 - DNA, 10 bp, Artificial Sequence
  Synthetic Sequence
tcgtatagca

SEQ ID NO: 9885 - DNA, 10 bp, Artificial Sequence
  Synthetic Sequence
agagtcacct

SEQ ID NO: 9886 - DNA, 10 bp, Artificial Sequence
  Synthetic Sequence
tcggagtctc

SEQ ID NO: 9887 - DNA, 10 bp, Artificial Sequence
  Synthetic Sequence
tgcgctttgt

SEQ ID NO: 9888 - DNA, 10 bp, Artificial Sequence
  Synthetic Sequence
gaccgattat

SEQ ID NO: 9889 - DNA, 10 bp, Artificial Sequence
  Synthetic Sequence
cctgtgtgca

SEQ ID NO: 9890 - DNA, 10 bp, Artificial Sequence
  Synthetic Sequence
cctatactat

SEQ ID NO: 9891 - DNA, 10 bp, Artificial Sequence
  Synthetic Sequence
ccgacccatg

SEQ ID NO: 9892 - DNA, 10 bp, Artificial Sequence
  Synthetic Sequence
tagcagaatg

SEQ ID NO: 9893 - DNA, 10 bp, Artificial Sequence
  Synthetic Sequence
cccgcatagc

SEQ ID NO: 9894 - DNA, 10 bp, Artificial Sequence
  Synthetic Sequence
taagagttat

SEQ ID NO: 9895 - DNA, 10 bp, Artificial Sequence
  Synthetic Sequence
actcttggta

SEQ ID NO: 9896 - DNA, 10 bp, Artificial Sequence
  Synthetic Sequence
tcctccgtgc

SEQ ID NO: 9897 - DNA, 10 bp, Artificial Sequence
  Synthetic Sequence
cccaagtcat

SEQ ID NO: 9898 - DNA, 10 bp, Artificial Sequence
  Synthetic Sequence
tgttgccatg

SEQ ID NO: 9899 - DNA, 10 bp, Artificial Sequence
  Synthetic Sequence
ttgtataagg

SEQ ID NO: 9900 - DNA, 10 bp, Artificial Sequence
  Synthetic Sequence
ccatcgattg

SEQ ID NO: 9901 - DNA, 10 bp, Artificial Sequence
  Synthetic Sequence
caggcgcaca

SEQ ID NO: 9902 - DNA, 10 bp, Artificial Sequence
  Synthetic Sequence
tttaatcttg

SEQ ID NO: 9903 - DNA, 10 bp, Artificial Sequence
  Synthetic Sequence
acatcaatac

SEQ ID NO: 9904 - DNA, 10 bp, Artificial Sequence
  Synthetic Sequence
ccggtatcgg

SEQ ID NO: 9905 - DNA, 10 bp, Artificial Sequence
  Synthetic Sequence
caacatcaca

SEQ ID NO: 9906 - DNA, 10 bp, Artificial Sequence
  Synthetic Sequence
ttgtagcggc

SEQ ID NO: 9907 - DNA, 10 bp, Artificial Sequence
  Synthetic Sequence
ccagactcgt

SEQ ID NO: 9908 - DNA, 10 bp, Artificial Sequence
  Synthetic Sequence
agtgatcgaa

SEQ ID NO: 9909 - DNA, 10 bp, Artificial Sequence
  Synthetic Sequence
acagagccca

SEQ ID NO: 9910 - DNA, 10 bp, Artificial Sequence
  Synthetic Sequence
cggcccatag

SEQ ID NO: 9911 - DNA, 10 bp, Artificial Sequence
  Synthetic Sequence
ctgtatcttc

SEQ ID NO: 9912 - DNA, 10 bp, Artificial Sequence
  Synthetic Sequence
ctgccggtgt

SEQ ID NO: 9913 - DNA, 10 bp, Artificial Sequence
  Synthetic Sequence
ccttgtagtg

SEQ ID NO: 9914 - DNA, 10 bp, Artificial Sequence
  Synthetic Sequence
gtatccattt

SEQ ID NO: 9915 - DNA, 10 bp, Artificial Sequence
  Synthetic Sequence
cgctaccgat

SEQ ID NO: 9916 - DNA, 10 bp, Artificial Sequence
  Synthetic Sequence
ccagatgtgt

SEQ ID NO: 9917 - DNA, 10 bp, Artificial Sequence
  Synthetic Sequence
agcaaacact

SEQ ID NO: 9918 - DNA, 10 bp, Artificial Sequence
  Synthetic Sequence
caatttaaag

SEQ ID NO: 9919 - DNA, 10 bp, Artificial Sequence
  Synthetic Sequence
agggtggtta

SEQ ID NO: 9920 - DNA, 10 bp, Artificial Sequence
  Synthetic Sequence
atattagact

SEQ ID NO: 9921 - DNA, 10 bp, Artificial Sequence
  Synthetic Sequence
ggtccttggt

SEQ ID NO: 9922 - DNA, 10 bp, Artificial Sequence
  Synthetic Sequence
ccttggccac

SEQ ID NO: 9923 - DNA, 10 bp, Artificial Sequence
  Synthetic Sequence
acgatgactc

SEQ ID NO: 9924 - DNA, 10 bp, Artificial Sequence
  Synthetic Sequence
ctgggagcgt

SEQ ID NO: 9925 - DNA, 10 bp, Artificial Sequence
  Synthetic Sequence
aactgcgcaa

SEQ ID NO: 9926 - DNA, 10 bp, Artificial Sequence
  Synthetic Sequence
acacctgcac

SEQ ID NO: 9927 - DNA, 10 bp, Artificial Sequence
  Synthetic Sequence
cagggtctat

SEQ ID NO: 9928 - DNA, 10 bp, Artificial Sequence
  Synthetic Sequence
taaactgggt

SEQ ID NO: 9929 - DNA, 10 bp, Artificial Sequence
  Synthetic Sequence
ggaacaagag

SEQ ID NO: 9930 - DNA, 10 bp, Artificial Sequence
  Synthetic Sequence
cagatggtcg

SEQ ID NO: 9931 - DNA, 10 bp, Artificial Sequence
  Synthetic Sequence
cagcatggac

SEQ ID NO: 9932 - DNA, 10 bp, Artificial Sequence
  Synthetic Sequence
gcgcgttctg

SEQ ID NO: 9933 - DNA, 10 bp, Artificial Sequence
  Synthetic Sequence
cggcggaaca

SEQ ID NO: 9934 - DNA, 10 bp, Artificial Sequence
  Synthetic Sequence
catctgtctg

SEQ ID NO: 9935 - DNA, 10 bp, Artificial Sequence
  Synthetic Sequence
acatcgcaat

SEQ ID NO: 9936 - DNA, 10 bp, Artificial Sequence
  Synthetic Sequence
ggagtggtag

SEQ ID NO: 9937 - DNA, 10 bp, Artificial Sequence
  Synthetic Sequence
agcgacgttg

SEQ ID NO: 9938 - DNA, 10 bp, Artificial Sequence
  Synthetic Sequence
acgttgacat

SEQ ID NO: 9939 - DNA, 10 bp, Artificial Sequence
  Synthetic Sequence
cagagaattg

SEQ ID NO: 9940 - DNA, 10 bp, Artificial Sequence
  Synthetic Sequence
caataatcgc

SEQ ID NO: 9941 - DNA, 10 bp, Artificial Sequence
  Synthetic Sequence
tttgttatgt

SEQ ID NO: 9942 - DNA, 10 bp, Artificial Sequence
  Synthetic Sequence
aactggagac

SEQ ID NO: 9943 - DNA, 10 bp, Artificial Sequence
  Synthetic Sequence
atattaccgg

SEQ ID NO: 9944 - DNA, 10 bp, Artificial Sequence
  Synthetic Sequence
ctacgataat

SEQ ID NO: 9945 - DNA, 10 bp, Artificial Sequence
  Synthetic Sequence
gttgagtaga

SEQ ID NO: 9946 - DNA, 10 bp, Artificial Sequence
  Synthetic Sequence
ggccaatcgc

SEQ ID NO: 9947 - DNA, 10 bp, Artificial Sequence
  Synthetic Sequence
gtaattccag

SEQ ID NO: 9948 - DNA, 10 bp, Artificial Sequence
  Synthetic Sequence
cggcaatcat

SEQ ID NO: 9949 - DNA, 10 bp, Artificial Sequence
  Synthetic Sequence
gcagggtggt

SEQ ID NO: 9950 - DNA, 10 bp, Artificial Sequence
  Synthetic Sequence
ctactgggtc

SEQ ID NO: 9951 - DNA, 10 bp, Artificial Sequence
  Synthetic Sequence
acgccgttac

SEQ ID NO: 9952 - DNA, 10 bp, Artificial Sequence
  Synthetic Sequence
gcgcagatgt

SEQ ID NO: 9953 - DNA, 10 bp, Artificial Sequence
  Synthetic Sequence
ctttgggttt

SEQ ID NO: 9954 - DNA, 10 bp, Artificial Sequence
  Synthetic Sequence
gcgtcacggt

SEQ ID NO: 9955 - DNA, 10 bp, Artificial Sequence
  Synthetic Sequence
cgacctgagg

SEQ ID NO: 9956 - DNA, 10 bp, Artificial Sequence
  Synthetic Sequence
cgtacttaat

SEQ ID NO: 9957 - DNA, 10 bp, Artificial Sequence
  Synthetic Sequence
ccctcttatg

SEQ ID NO: 9958 - DNA, 10 bp, Artificial Sequence
  Synthetic Sequence
tacgccatcg

SEQ ID NO: 9959 - DNA, 10 bp, Artificial Sequence
  Synthetic Sequence
cctccgtgaa

SEQ ID NO: 9960 - DNA, 10 bp, Artificial Sequence
  Synthetic Sequence
gattgattca

SEQ ID NO: 9961 - DNA, 10 bp, Artificial Sequence
  Synthetic Sequence
gctcaagcaa

SEQ ID NO: 9962 - DNA, 10 bp, Artificial Sequence
  Synthetic Sequence
tcctcaacgt

SEQ ID NO: 9963 - DNA, 10 bp, Artificial Sequence
  Synthetic Sequence
gaccatagta

SEQ ID NO: 9964 - DNA, 10 bp, Artificial Sequence
  Synthetic Sequence
ccggcaggtt

SEQ ID NO: 9965 - DNA, 10 bp, Artificial Sequence
  Synthetic Sequence
gctgcatcct

SEQ ID NO: 9966 - DNA, 10 bp, Artificial Sequence
  Synthetic Sequence
tagtagcttt

SEQ ID NO: 9967 - DNA, 10 bp, Artificial Sequence
  Synthetic Sequence
acttctgaaa

SEQ ID NO: 9968 - DNA, 10 bp, Artificial Sequence
  Synthetic Sequence
gtatataacc

SEQ ID NO: 9969 - DNA, 10 bp, Artificial Sequence
  Synthetic Sequence
ctcttcggcg

SEQ ID NO: 9970 - DNA, 10 bp, Artificial Sequence
  Synthetic Sequence
taaaggagac

SEQ ID NO: 9971 - DNA, 10 bp, Artificial Sequence
  Synthetic Sequence
catattgaat

SEQ ID NO: 9972 - DNA, 10 bp, Artificial Sequence
  Synthetic Sequence
ggttgtctta

SEQ ID NO: 9973 - DNA, 10 bp, Artificial Sequence
  Synthetic Sequence
cggatctagg

SEQ ID NO: 9974 - DNA, 10 bp, Artificial Sequence
  Synthetic Sequence
gggtcacgca

SEQ ID NO: 9975 - DNA, 10 bp, Artificial Sequence
  Synthetic Sequence
ggtaagccca

SEQ ID NO: 9976 - DNA, 10 bp, Artificial Sequence
  Synthetic Sequence
aagtaatcaa

SEQ ID NO: 9977 - DNA, 10 bp, Artificial Sequence
  Synthetic Sequence
tatcccaatg

SEQ ID NO: 9978 - DNA, 10 bp, Artificial Sequence
  Synthetic Sequence
ttgcttcgtg

SEQ ID NO: 9979 - DNA, 10 bp, Artificial Sequence
  Synthetic Sequence
ccacatcagt

SEQ ID NO: 9980 - DNA, 10 bp, Artificial Sequence
  Synthetic Sequence
ggccacatgc

SEQ ID NO: 9981 - DNA, 10 bp, Artificial Sequence
  Synthetic Sequence
ctaatcgcac

SEQ ID NO: 9982 - DNA, 10 bp, Artificial Sequence
  Synthetic Sequence
cgcaatccat

SEQ ID NO: 9983 - DNA, 10 bp, Artificial Sequence
  Synthetic Sequence
tcaaggatct

SEQ ID NO: 9984 - DNA, 10 bp, Artificial Sequence
  Synthetic Sequence
gaatctcttt

SEQ ID NO: 9985 - DNA, 10 bp, Artificial Sequence
  Synthetic Sequence
gaagggtact

SEQ ID NO: 9986 - DNA, 10 bp, Artificial Sequence
  Synthetic Sequence
cgctcctgga

SEQ ID NO: 9987 - DNA, 10 bp, Artificial Sequence
  Synthetic Sequence
aacgtgaatt

SEQ ID NO: 9988 - DNA, 10 bp, Artificial Sequence
  Synthetic Sequence
ccggtccaga

SEQ ID NO: 9989 - DNA, 10 bp, Artificial Sequence
  Synthetic Sequence
cgacccatgc

SEQ ID NO: 9990 - DNA, 10 bp, Artificial Sequence
  Synthetic Sequence
tatgggagcg

SEQ ID NO: 9991 - DNA, 10 bp, Artificial Sequence
  Synthetic Sequence
taaggccgtc

SEQ ID NO: 9992 - DNA, 10 bp, Artificial Sequence
  Synthetic Sequence
gtagtgggcg

SEQ ID NO: 9993 - DNA, 10 bp, Artificial Sequence
  Synthetic Sequence
tgctataacg

SEQ ID NO: 9994 - DNA, 10 bp, Artificial Sequence
  Synthetic Sequence
ggaggaccca

SEQ ID NO: 9995 - DNA, 10 bp, Artificial Sequence
  Synthetic Sequence
gtacttggag

SEQ ID NO: 9996 - DNA, 10 bp, Artificial Sequence
  Synthetic Sequence
ttggaatcgt

SEQ ID NO: 9997 - DNA, 10 bp, Artificial Sequence
  Synthetic Sequence
agagcttaat

SEQ ID NO: 9998 - DNA, 10 bp, Artificial Sequence
  Synthetic Sequence
gctgccggat

SEQ ID NO: 9999 - DNA, 10 bp, Artificial Sequence
  Synthetic Sequence
agacggtacg

SEQ ID NO: 10000 - DNA, 10 bp, Artificial Sequence
  Synthetic Sequence
ggatcagact

SEQ ID NO: 10001 - DNA, 10 bp, Artificial Sequence
  Synthetic Sequence
cgggcctatg

SEQ ID NO: 10002 - DNA, 10 bp, Artificial Sequence
  Synthetic Sequence
ttcgaggatg

SEQ ID NO: 10003 - DNA, 10 bp, Artificial Sequence
  Synthetic Sequence
cgcgagttcc

SEQ ID NO: 10004 - DNA, 10 bp, Artificial Sequence
  Synthetic Sequence
tttgcgctcg

SEQ ID NO: 10005 - DNA, 10 bp, Artificial Sequence
  Synthetic Sequence
gcttatccac

SEQ ID NO: 10006 - DNA, 10 bp, Artificial Sequence
  Synthetic Sequence
gcgaaacgga

SEQ ID NO: 10007 - DNA, 10 bp, Artificial Sequence
  Synthetic Sequence
atcacttgtc

SEQ ID NO: 10008 - DNA, 10 bp, Artificial Sequence
  Synthetic Sequence
tacccttggt

SEQ ID NO: 10009 - DNA, 10 bp, Artificial Sequence
  Synthetic Sequence
cttaaggtgc

SEQ ID NO: 10010 - DNA, 10 bp, Artificial Sequence
  Synthetic Sequence
ctcgcaatag

SEQ ID NO: 10011 - DNA, 10 bp, Artificial Sequence
  Synthetic Sequence
tatacggagc

SEQ ID NO: 10012 - DNA, 10 bp, Artificial Sequence
  Synthetic Sequence
agataataat

SEQ ID NO: 10013 - DNA, 10 bp, Artificial Sequence
  Synthetic Sequence
gcgtaataac

SEQ ID NO: 10014 - DNA, 10 bp, Artificial Sequence
  Synthetic Sequence
tgttaaggaa

SEQ ID NO: 10015 - DNA, 10 bp, Artificial Sequence
  Synthetic Sequence
ttctaaagaa

SEQ ID NO: 10016 - DNA, 10 bp, Artificial Sequence
  Synthetic Sequence
tagcaacccg

SEQ ID NO: 10017 - DNA, 10 bp, Artificial Sequence
  Synthetic Sequence
gaactgccta

SEQ ID NO: 10018 - DNA, 10 bp, Artificial Sequence
  Synthetic Sequence
acgtgtctaa

SEQ ID NO: 10019 - DNA, 10 bp, Artificial Sequence
  Synthetic Sequence
aggcgaggtc

SEQ ID NO: 10020 - DNA, 10 bp, Artificial Sequence
  Synthetic Sequence
ctcggcaaga

SEQ ID NO: 10021 - DNA, 10 bp, Artificial Sequence
  Synthetic Sequence
ggcacccgat

SEQ ID NO: 10022 - DNA, 10 bp, Artificial Sequence
  Synthetic Sequence
attcaatgtc

SEQ ID NO: 10023 - DNA, 10 bp, Artificial Sequence
  Synthetic Sequence
agctaaatta

SEQ ID NO: 10024 - DNA, 10 bp, Artificial Sequence
  Synthetic Sequence
taggccactg

SEQ ID NO: 10025 - DNA, 10 bp, Artificial Sequence
  Synthetic Sequence
tcctagatct

SEQ ID NO: 10026 - DNA, 10 bp, Artificial Sequence
  Synthetic Sequence
tctacttggc

SEQ ID NO: 10027 - DNA, 10 bp, Artificial Sequence
  Synthetic Sequence
gtccttgtgg

SEQ ID NO: 10028 - DNA, 10 bp, Artificial Sequence
  Synthetic Sequence
ggtacagcgg

SEQ ID NO: 10029 - DNA, 10 bp, Artificial Sequence
  Synthetic Sequence
cggttcatcg

SEQ ID NO: 10030 - DNA, 10 bp, Artificial Sequence
  Synthetic Sequence
ctctgatgtt

SEQ ID NO: 10031 - DNA, 10 bp, Artificial Sequence
  Synthetic Sequence
cgtgttgtgt

SEQ ID NO: 10032 - DNA, 10 bp, Artificial Sequence
  Synthetic Sequence
ctttgaccat

SEQ ID NO: 10033 - DNA, 10 bp, Artificial Sequence
  Synthetic Sequence
aactttgtct

SEQ ID NO: 10034 - DNA, 10 bp, Artificial Sequence
  Synthetic Sequence
ctgttacagc

SEQ ID NO: 10035 - DNA, 10 bp, Artificial Sequence
  Synthetic Sequence
ttcaccttac

SEQ ID NO: 10036 - DNA, 10 bp, Artificial Sequence
  Synthetic Sequence
tttctcgtca

SEQ ID NO: 10037 - DNA, 10 bp, Artificial Sequence
  Synthetic Sequence
gacgccgaca

SEQ ID NO: 10038 - DNA, 10 bp, Artificial Sequence
  Synthetic Sequence
gtctgagacg

SEQ ID NO: 10039 - DNA, 10 bp, Artificial Sequence
  Synthetic Sequence
aaggtttatg

SEQ ID NO: 10040 - DNA, 10 bp, Artificial Sequence
  Synthetic Sequence
aggtctgtcg

SEQ ID NO: 10041 - DNA, 10 bp, Artificial Sequence
  Synthetic Sequence
tgcgtggttc

SEQ ID NO: 10042 - DNA, 10 bp, Artificial Sequence
  Synthetic Sequence
cgcccgcata

SEQ ID NO: 10043 - DNA, 10 bp, Artificial Sequence
  Synthetic Sequence
tttatcgctt

SEQ ID NO: 10044 - DNA, 10 bp, Artificial Sequence
  Synthetic Sequence
caggatccgt

SEQ ID NO: 10045 - DNA, 10 bp, Artificial Sequence
  Synthetic Sequence
cgagtaaaca

SEQ ID NO: 10046 - DNA, 10 bp, Artificial Sequence
  Synthetic Sequence
tgcttccctg

SEQ ID NO: 10047 - DNA, 10 bp, Artificial Sequence
  Synthetic Sequence
gtatgtacgt

SEQ ID NO: 10048 - DNA, 10 bp, Artificial Sequence
  Synthetic Sequence
atttcaatgg

SEQ ID NO: 10049 - DNA, 10 bp, Artificial Sequence
  Synthetic Sequence
cgctgaccca

SEQ ID NO: 10050 - DNA, 10 bp, Artificial Sequence
  Synthetic Sequence
ccttaacagg

SEQ ID NO: 10051 - DNA, 10 bp, Artificial Sequence
  Synthetic Sequence
tgaggttcat

SEQ ID NO: 10052 - DNA, 10 bp, Artificial Sequence
  Synthetic Sequence
gtgccaggga

SEQ ID NO: 10053 - DNA, 10 bp, Artificial Sequence
  Synthetic Sequence
tgaactcgcc

SEQ ID NO: 10054 - DNA, 10 bp, Artificial Sequence
  Synthetic Sequence
tttagttggt

SEQ ID NO: 10055 - DNA, 10 bp, Artificial Sequence
  Synthetic Sequence
attgagcgcc

SEQ ID NO: 10056 - DNA, 10 bp, Artificial Sequence
  Synthetic Sequence
gcttagccgg

SEQ ID NO: 10057 - DNA, 10 bp, Artificial Sequence
  Synthetic Sequence
ggctgaagat

SEQ ID NO: 10058 - DNA, 10 bp, Artificial Sequence
  Synthetic Sequence
ccaaggtaag

SEQ ID NO: 10059 - DNA, 10 bp, Artificial Sequence
  Synthetic Sequence
cggacatatc

SEQ ID NO: 10060 - DNA, 10 bp, Artificial Sequence
  Synthetic Sequence
accgatctcc

SEQ ID NO: 10061 - DNA, 10 bp, Artificial Sequence
  Synthetic Sequence
ggaaggagta

SEQ ID NO: 10062 - DNA, 10 bp, Artificial Sequence
  Synthetic Sequence
gatgagatct

SEQ ID NO: 10063 - DNA, 10 bp, Artificial Sequence
  Synthetic Sequence
ctttagtagc

SEQ ID NO: 10064 - DNA, 10 bp, Artificial Sequence
  Synthetic Sequence
gcctgttctc

SEQ ID NO: 10065 - DNA, 10 bp, Artificial Sequence
  Synthetic Sequence
actaaggata

SEQ ID NO: 10066 - DNA, 10 bp, Artificial Sequence
  Synthetic Sequence
tttatataag

SEQ ID NO: 10067 - DNA, 10 bp, Artificial Sequence
  Synthetic Sequence
cgatagtgac

SEQ ID NO: 10068 - DNA, 10 bp, Artificial Sequence
  Synthetic Sequence
tcacttactc

SEQ ID NO: 10069 - DNA, 10 bp, Artificial Sequence
  Synthetic Sequence
gtactcggta

SEQ ID NO: 10070 - DNA, 10 bp, Artificial Sequence
  Synthetic Sequence
tcacccgtac

SEQ ID NO: 10071 - DNA, 10 bp, Artificial Sequence
  Synthetic Sequence
gattcaggga

SEQ ID NO: 10072 - DNA, 10 bp, Artificial Sequence
  Synthetic Sequence
gagaggcgtc

SEQ ID NO: 10073 - DNA, 10 bp, Artificial Sequence
  Synthetic Sequence
gctcatgaac

SEQ ID NO: 10074 - DNA, 10 bp, Artificial Sequence
  Synthetic Sequence
ccaataatga

SEQ ID NO: 10075 - DNA, 10 bp, Artificial Sequence
  Synthetic Sequence
tagatcgtac

SEQ ID NO: 10076 - DNA, 10 bp, Artificial Sequence
  Synthetic Sequence
aagcttgcgc

SEQ ID NO: 10077 - DNA, 10 bp, Artificial Sequence
  Synthetic Sequence
gttacgtcga

SEQ ID NO: 10078 - DNA, 10 bp, Artificial Sequence
  Synthetic Sequence
ggtctgggtg

SEQ ID NO: 10079 - DNA, 10 bp, Artificial Sequence
  Synthetic Sequence
tcttacccta

SEQ ID NO: 10080 - DNA, 10 bp, Artificial Sequence
  Synthetic Sequence
acttgtgttt

SEQ ID NO: 10081 - DNA, 10 bp, Artificial Sequence
  Synthetic Sequence
tatccgttgt

SEQ ID NO: 10082 - DNA, 10 bp, Artificial Sequence
  Synthetic Sequence
tcgagataga

SEQ ID NO: 10083 - DNA, 10 bp, Artificial Sequence
  Synthetic Sequence
tctgtagagc

SEQ ID NO: 10084 - DNA, 10 bp, Artificial Sequence
  Synthetic Sequence
gacactgggc

SEQ ID NO: 10085 - DNA, 10 bp, Artificial Sequence
  Synthetic Sequence
ggacattccc

SEQ ID NO: 10086 - DNA, 10 bp, Artificial Sequence
  Synthetic Sequence
attctgagtg

SEQ ID NO: 10087 - DNA, 10 bp, Artificial Sequence
  Synthetic Sequence
gagagccaag

SEQ ID NO: 10088 - DNA, 10 bp, Artificial Sequence
  Synthetic Sequence
ccgcgacaca

SEQ ID NO: 10089 - DNA, 10 bp, Artificial Sequence
  Synthetic Sequence
gcgttggagc

SEQ ID NO: 10090 - DNA, 10 bp, Artificial Sequence
  Synthetic Sequence
ctcaattcag

SEQ ID NO: 10091 - DNA, 10 bp, Artificial Sequence
  Synthetic Sequence
atgtatcggt

SEQ ID NO: 10092 - DNA, 10 bp, Artificial Sequence
  Synthetic Sequence
tgccgtaggc

SEQ ID NO: 10093 - DNA, 10 bp, Artificial Sequence
  Synthetic Sequence
gtatctcact

SEQ ID NO: 10094 - DNA, 10 bp, Artificial Sequence
  Synthetic Sequence
accgcggact

SEQ ID NO: 10095 - DNA, 10 bp, Artificial Sequence
  Synthetic Sequence
cgtatcgctg

SEQ ID NO: 10096 - DNA, 10 bp, Artificial Sequence
  Synthetic Sequence
agcattgtta

SEQ ID NO: 10097 - DNA, 10 bp, Artificial Sequence
  Synthetic Sequence
tcctcatccc

SEQ ID NO: 10098 - DNA, 10 bp, Artificial Sequence
  Synthetic Sequence
aacatcgtcc

SEQ ID NO: 10099 - DNA, 10 bp, Artificial Sequence
  Synthetic Sequence
cacgaggtct

SEQ ID NO: 10100 - DNA, 10 bp, Artificial Sequence
  Synthetic Sequence
ttcgtcaagg

SEQ ID NO: 10101 - DNA, 10 bp, Artificial Sequence
  Synthetic Sequence
gcatgcaact

SEQ ID NO: 10102 - DNA, 10 bp, Artificial Sequence
  Synthetic Sequence
gatatcgtgc

SEQ ID NO: 10103 - DNA, 10 bp, Artificial Sequence
  Synthetic Sequence
gagtctgcgc

SEQ ID NO: 10104 - DNA, 10 bp, Artificial Sequence
  Synthetic Sequence
gcaaatatcc

SEQ ID NO: 10105 - DNA, 10 bp, Artificial Sequence
  Synthetic Sequence
cgcccttcct

SEQ ID NO: 10106 - DNA, 10 bp, Artificial Sequence
  Synthetic Sequence
agttgaccct

SEQ ID NO: 10107 - DNA, 10 bp, Artificial Sequence
  Synthetic Sequence
cccactagtc

SEQ ID NO: 10108 - DNA, 10 bp, Artificial Sequence
  Synthetic Sequence
gtgtctcgac

SEQ ID NO: 10109 - DNA, 10 bp, Artificial Sequence
  Synthetic Sequence
tttagttaac

SEQ ID NO: 10110 - DNA, 10 bp, Artificial Sequence
  Synthetic Sequence
ggcagactgc

SEQ ID NO: 10111 - DNA, 10 bp, Artificial Sequence
  Synthetic Sequence
cttgtctgcg

SEQ ID NO: 10112 - DNA, 10 bp, Artificial Sequence
  Synthetic Sequence
gttgggccac

SEQ ID NO: 10113 - DNA, 10 bp, Artificial Sequence
  Synthetic Sequence
catcgacgga

SEQ ID NO: 10114 - DNA, 10 bp, Artificial Sequence
  Synthetic Sequence
acttatagga

SEQ ID NO: 10115 - DNA, 10 bp, Artificial Sequence
  Synthetic Sequence
tcgatgttat

SEQ ID NO: 10116 - DNA, 10 bp, Artificial Sequence
  Synthetic Sequence
aggctaatct

SEQ ID NO: 10117 - DNA, 10 bp, Artificial Sequence
  Synthetic Sequence
atacgattta

SEQ ID NO: 10118 - DNA, 10 bp, Artificial Sequence
  Synthetic Sequence
ttacttcggc

SEQ ID NO: 10119 - DNA, 10 bp, Artificial Sequence
  Synthetic Sequence
ggctcatcat

SEQ ID NO: 10120 - DNA, 10 bp, Artificial Sequence
  Synthetic Sequence
cctgaacctc

SEQ ID NO: 10121 - DNA, 10 bp, Artificial Sequence
  Synthetic Sequence
gctcccgaag

SEQ ID NO: 10122 - DNA, 10 bp, Artificial Sequence
  Synthetic Sequence
caggtgtacg

SEQ ID NO: 10123 - DNA, 10 bp, Artificial Sequence
  Synthetic Sequence
ctgtgggcat

SEQ ID NO: 10124 - DNA, 10 bp, Artificial Sequence
  Synthetic Sequence
aatatacaca

SEQ ID NO: 10125 - DNA, 10 bp, Artificial Sequence
  Synthetic Sequence
ttagcccatc

SEQ ID NO: 10126 - DNA, 10 bp, Artificial Sequence
  Synthetic Sequence
gggctattgc

SEQ ID NO: 10127 - DNA, 10 bp, Artificial Sequence
  Synthetic Sequence
atcatatgct

SEQ ID NO: 10128 - DNA, 10 bp, Artificial Sequence
  Synthetic Sequence
atctctggtg

SEQ ID NO: 10129 - DNA, 10 bp, Artificial Sequence
  Synthetic Sequence
gattccctgc

SEQ ID NO: 10130 - DNA, 10 bp, Artificial Sequence
  Synthetic Sequence
tgaatatccc

SEQ ID NO: 10131 - DNA, 10 bp, Artificial Sequence
  Synthetic Sequence
acccatccac

SEQ ID NO: 10132 - DNA, 10 bp, Artificial Sequence
  Synthetic Sequence
attcgactat

SEQ ID NO: 10133 - DNA, 10 bp, Artificial Sequence
  Synthetic Sequence
ttctgactag

SEQ ID NO: 10134 - DNA, 10 bp, Artificial Sequence
  Synthetic Sequence
caaacagtat

SEQ ID NO: 10135 - DNA, 10 bp, Artificial Sequence
  Synthetic Sequence
ccacctctct

SEQ ID NO: 10136 - DNA, 10 bp, Artificial Sequence
  Synthetic Sequence
actttgggca

SEQ ID NO: 10137 - DNA, 10 bp, Artificial Sequence
  Synthetic Sequence
aaagtcgcta

SEQ ID NO: 10138 - DNA, 10 bp, Artificial Sequence
  Synthetic Sequence
ggataccagc

SEQ ID NO: 10139 - DNA, 10 bp, Artificial Sequence
  Synthetic Sequence
tgcctctggc

SEQ ID NO: 10140 - DNA, 10 bp, Artificial Sequence
  Synthetic Sequence
tgtatgacaa

SEQ ID NO: 10141 - DNA, 10 bp, Artificial Sequence
  Synthetic Sequence
tcgacaccgt

SEQ ID NO: 10142 - DNA, 10 bp, Artificial Sequence
  Synthetic Sequence
cactcaagca

SEQ ID NO: 10143 - DNA, 10 bp, Artificial Sequence
  Synthetic Sequence
agaaagtagc

SEQ ID NO: 10144 - DNA, 10 bp, Artificial Sequence
  Synthetic Sequence
ggatgtttca

SEQ ID NO: 10145 - DNA, 10 bp, Artificial Sequence
  Synthetic Sequence
cttaaattac

SEQ ID NO: 10146 - DNA, 10 bp, Artificial Sequence
  Synthetic Sequence
atgaggtgga

SEQ ID NO: 10147 - DNA, 10 bp, Artificial Sequence
  Synthetic Sequence
tgggcgacca

SEQ ID NO: 10148 - DNA, 10 bp, Artificial Sequence
  Synthetic Sequence
aaaccctttc

SEQ ID NO: 10149 - DNA, 10 bp, Artificial Sequence
  Synthetic Sequence
caaccacggc

SEQ ID NO: 10150 - DNA, 10 bp, Artificial Sequence
  Synthetic Sequence
tcacagctgc

SEQ ID NO: 10151 - DNA, 10 bp, Artificial Sequence
  Synthetic Sequence
aatatcggac

SEQ ID NO: 10152 - DNA, 10 bp, Artificial Sequence
  Synthetic Sequence
tgatcttcag

SEQ ID NO: 10153 - DNA, 10 bp, Artificial Sequence
  Synthetic Sequence
accacccaca

SEQ ID NO: 10154 - DNA, 10 bp, Artificial Sequence
  Synthetic Sequence
ggccctcttg

SEQ ID NO: 10155 - DNA, 10 bp, Artificial Sequence
  Synthetic Sequence
ctgattatta

SEQ ID NO: 10156 - DNA, 10 bp, Artificial Sequence
  Synthetic Sequence
cgttcctcat

SEQ ID NO: 10157 - DNA, 10 bp, Artificial Sequence
  Synthetic Sequence
caagcgccct

SEQ ID NO: 10158 - DNA, 10 bp, Artificial Sequence
  Synthetic Sequence
atacatgcag

SEQ ID NO: 10159 - DNA, 10 bp, Artificial Sequence
  Synthetic Sequence
gcctgacgct

SEQ ID NO: 10160 - DNA, 10 bp, Artificial Sequence
  Synthetic Sequence
atgcgttgat

SEQ ID NO: 10161 - DNA, 10 bp, Artificial Sequence
  Synthetic Sequence
gttattcatg

SEQ ID NO: 10162 - DNA, 10 bp, Artificial Sequence
  Synthetic Sequence
aataacctcg

SEQ ID NO: 10163 - DNA, 10 bp, Artificial Sequence
  Synthetic Sequence
gttgtaagca

SEQ ID NO: 10164 - DNA, 10 bp, Artificial Sequence
  Synthetic Sequence
cggcaaatta

SEQ ID NO: 10165 - DNA, 10 bp, Artificial Sequence
  Synthetic Sequence
tttctgcctc

SEQ ID NO: 10166 - DNA, 10 bp, Artificial Sequence
  Synthetic Sequence
caccactctt

SEQ ID NO: 10167 - DNA, 10 bp, Artificial Sequence
  Synthetic Sequence
ctgttcgcga

SEQ ID NO: 10168 - DNA, 10 bp, Artificial Sequence
  Synthetic Sequence
acttctagtt

SEQ ID NO: 10169 - DNA, 10 bp, Artificial Sequence
  Synthetic Sequence
taacacgcca

SEQ ID NO: 10170 - DNA, 10 bp, Artificial Sequence
  Synthetic Sequence
ttcagctggc

SEQ ID NO: 10171 - DNA, 10 bp, Artificial Sequence
  Synthetic Sequence
agcctttccc

SEQ ID NO: 10172 - DNA, 10 bp, Artificial Sequence
  Synthetic Sequence
cctgccacca

SEQ ID NO: 10173 - DNA, 10 bp, Artificial Sequence
  Synthetic Sequence
ccgggaacac

SEQ ID NO: 10174 - DNA, 10 bp, Artificial Sequence
  Synthetic Sequence
caggctcctc

SEQ ID NO: 10175 - DNA, 10 bp, Artificial Sequence
  Synthetic Sequence
ctgaccacga

SEQ ID NO: 10176 - DNA, 10 bp, Artificial Sequence
  Synthetic Sequence
taacaggtcg

SEQ ID NO: 10177 - DNA, 10 bp, Artificial Sequence
  Synthetic Sequence
ccatctgatt

SEQ ID NO: 10178 - DNA, 10 bp, Artificial Sequence
  Synthetic Sequence
tcatagcccg

SEQ ID NO: 10179 - DNA, 10 bp, Artificial Sequence
  Synthetic Sequence
atccggatca

SEQ ID NO: 10180 - DNA, 10 bp, Artificial Sequence
  Synthetic Sequence
ctggtgatcg

SEQ ID NO: 10181 - DNA, 10 bp, Artificial Sequence
  Synthetic Sequence
caagggaaca

SEQ ID NO: 10182 - DNA, 10 bp, Artificial Sequence
  Synthetic Sequence
gatcctgctc

SEQ ID NO: 10183 - DNA, 10 bp, Artificial Sequence
  Synthetic Sequence
ctagagttgt

SEQ ID NO: 10184 - DNA, 10 bp, Artificial Sequence
  Synthetic Sequence
cttctcaaac

SEQ ID NO: 10185 - DNA, 10 bp, Artificial Sequence
  Synthetic Sequence
atgaatgact

SEQ ID NO: 10186 - DNA, 10 bp, Artificial Sequence
  Synthetic Sequence
gcgaatcagg

SEQ ID NO: 10187 - DNA, 10 bp, Artificial Sequence
  Synthetic Sequence
tcagaccttt

SEQ ID NO: 10188 - DNA, 10 bp, Artificial Sequence
  Synthetic Sequence
ccacatgtac

SEQ ID NO: 10189 - DNA, 10 bp, Artificial Sequence
  Synthetic Sequence
ttacaactta

SEQ ID NO: 10190 - DNA, 10 bp, Artificial Sequence
  Synthetic Sequence
gcagaatact

SEQ ID NO: 10191 - DNA, 10 bp, Artificial Sequence
  Synthetic Sequence
ggcgatacgg

SEQ ID NO: 10192 - DNA, 10 bp, Artificial Sequence
  Synthetic Sequence
tccttaaact

SEQ ID NO: 10193 - DNA, 10 bp, Artificial Sequence
  Synthetic Sequence
gcagaacgcc

SEQ ID NO: 10194 - DNA, 10 bp, Artificial Sequence
  Synthetic Sequence
cgcgtattgt

SEQ ID NO: 10195 - DNA, 10 bp, Artificial Sequence
  Synthetic Sequence
catagaccca

SEQ ID NO: 10196 - DNA, 10 bp, Artificial Sequence
  Synthetic Sequence
acaatgggcc

SEQ ID NO: 10197 - DNA, 10 bp, Artificial Sequence
  Synthetic Sequence
gatcacccgc

SEQ ID NO: 10198 - DNA, 10 bp, Artificial Sequence
  Synthetic Sequence
ctcgatgcca

SEQ ID NO: 10199 - DNA, 10 bp, Artificial Sequence
  Synthetic Sequence
tattcagcag

SEQ ID NO: 10200 - DNA, 10 bp, Artificial Sequence
  Synthetic Sequence
aacgagcgct

SEQ ID NO: 10201 - DNA, 10 bp, Artificial Sequence
  Synthetic Sequence
aaaggatgtc

SEQ ID NO: 10202 - DNA, 10 bp, Artificial Sequence
  Synthetic Sequence
gaaatgttgg

SEQ ID NO: 10203 - DNA, 10 bp, Artificial Sequence
  Synthetic Sequence
ctgtatcacg

SEQ ID NO: 10204 - DNA, 10 bp, Artificial Sequence
  Synthetic Sequence
cggcgctaag

SEQ ID NO: 10205 - DNA, 10 bp, Artificial Sequence
  Synthetic Sequence
taagagcctt

SEQ ID NO: 10206 - DNA, 10 bp, Artificial Sequence
  Synthetic Sequence
tatccacaac

SEQ ID NO: 10207 - DNA, 10 bp, Artificial Sequence
  Synthetic Sequence
tgaggatttg

SEQ ID NO: 10208 - DNA, 10 bp, Artificial Sequence
  Synthetic Sequence
tttcaaatct

SEQ ID NO: 10209 - DNA, 10 bp, Artificial Sequence
  Synthetic Sequence
gcagttgaaa

SEQ ID NO: 10210 - DNA, 10 bp, Artificial Sequence
  Synthetic Sequence
ttctcgcatg

SEQ ID NO: 10211 - DNA, 10 bp, Artificial Sequence
  Synthetic Sequence
tggccatgcc

SEQ ID NO: 10212 - DNA, 10 bp, Artificial Sequence
  Synthetic Sequence
aacaacgtag

SEQ ID NO: 10213 - DNA, 10 bp, Artificial Sequence
  Synthetic Sequence
ggaatattaa

SEQ ID NO: 10214 - DNA, 10 bp, Artificial Sequence
  Synthetic Sequence
gactgcaacc

SEQ ID NO: 10215 - DNA, 10 bp, Artificial Sequence
  Synthetic Sequence
ctcgacttaa

SEQ ID NO: 10216 - DNA, 10 bp, Artificial Sequence
  Synthetic Sequence
tcgtctgccc

SEQ ID NO: 10217 - DNA, 10 bp, Artificial Sequence
  Synthetic Sequence
aggaaagtcg

SEQ ID NO: 10218 - DNA, 10 bp, Artificial Sequence
  Synthetic Sequence
cactctggcg

SEQ ID NO: 10219 - DNA, 10 bp, Artificial Sequence
  Synthetic Sequence
ccgtaattcg

SEQ ID NO: 10220 - DNA, 10 bp, Artificial Sequence
  Synthetic Sequence
ctaggtcatt

SEQ ID NO: 10221 - DNA, 10 bp, Artificial Sequence
  Synthetic Sequence
ctaccaaccg

SEQ ID NO: 10222 - DNA, 10 bp, Artificial Sequence
  Synthetic Sequence
tatctgctat

SEQ ID NO: 10223 - DNA, 10 bp, Artificial Sequence
  Synthetic Sequence
atacgaaaca

SEQ ID NO: 10224 - DNA, 10 bp, Artificial Sequence
  Synthetic Sequence
tattgcgctg

SEQ ID NO: 10225 - DNA, 10 bp, Artificial Sequence
  Synthetic Sequence
tgctgcattt

SEQ ID NO: 10226 - DNA, 10 bp, Artificial Sequence
  Synthetic Sequence
aggtcccatc

SEQ ID NO: 10227 - DNA, 10 bp, Artificial Sequence
  Synthetic Sequence
aatgtgtcta

SEQ ID NO: 10228 - DNA, 10 bp, Artificial Sequence
  Synthetic Sequence
agttgacaag

SEQ ID NO: 10229 - DNA, 10 bp, Artificial Sequence
  Synthetic Sequence
actgaccata

SEQ ID NO: 10230 - DNA, 10 bp, Artificial Sequence
  Synthetic Sequence
acaacacact

SEQ ID NO: 10231 - DNA, 10 bp, Artificial Sequence
  Synthetic Sequence
tagacactag

SEQ ID NO: 10232 - DNA, 10 bp, Artificial Sequence
  Synthetic Sequence
tccttaggga

SEQ ID NO: 10233 - DNA, 10 bp, Artificial Sequence
  Synthetic Sequence
aaaggtcagt

SEQ ID NO: 10234 - DNA, 10 bp, Artificial Sequence
  Synthetic Sequence
gacgcatcaa

SEQ ID NO: 10235 - DNA, 10 bp, Artificial Sequence
  Synthetic Sequence
gcccagtatg

SEQ ID NO: 10236 - DNA, 10 bp, Artificial Sequence
  Synthetic Sequence
agagcgctgc

SEQ ID NO: 10237 - DNA, 10 bp, Artificial Sequence
  Synthetic Sequence
ccgatttcga

SEQ ID NO: 10238 - DNA, 10 bp, Artificial Sequence
  Synthetic Sequence
tcctacacga

SEQ ID NO: 10239 - DNA, 10 bp, Artificial Sequence
  Synthetic Sequence
ctaacactac

SEQ ID NO: 10240 - DNA, 10 bp, Artificial Sequence
  Synthetic Sequence
aaattctaat

SEQ ID NO: 10241 - DNA, 10 bp, Artificial Sequence
  Synthetic Sequence
cagttgtcat

SEQ ID NO: 10242 - DNA, 10 bp, Artificial Sequence
  Synthetic Sequence
aatacttatc

SEQ ID NO: 10243 - DNA, 10 bp, Artificial Sequence
  Synthetic Sequence
gagcgcacga

SEQ ID NO: 10244 - DNA, 10 bp, Artificial Sequence
  Synthetic Sequence
accgaagaac

SEQ ID NO: 10245 - DNA, 10 bp, Artificial Sequence
  Synthetic Sequence
cgacgttatt

SEQ ID NO: 10246 - DNA, 10 bp, Artificial Sequence
  Synthetic Sequence
tagccgagta

SEQ ID NO: 10247 - DNA, 10 bp, Artificial Sequence
  Synthetic Sequence
tgccgacatg

SEQ ID NO: 10248 - DNA, 10 bp, Artificial Sequence
  Synthetic Sequence
cgcagagtcc

SEQ ID NO: 10249 - DNA, 10 bp, Artificial Sequence
  Synthetic Sequence
aaacaaggat

SEQ ID NO: 10250 - DNA, 10 bp, Artificial Sequence
  Synthetic Sequence
ggaagcctcg

SEQ ID NO: 10251 - DNA, 10 bp, Artificial Sequence
  Synthetic Sequence
gtactaagcc

SEQ ID NO: 10252 - DNA, 10 bp, Artificial Sequence
  Synthetic Sequence
catgatttag

SEQ ID NO: 10253 - DNA, 10 bp, Artificial Sequence
  Synthetic Sequence
aacgagattc

SEQ ID NO: 10254 - DNA, 10 bp, Artificial Sequence
  Synthetic Sequence
tccaaactct

SEQ ID NO: 10255 - DNA, 10 bp, Artificial Sequence
  Synthetic Sequence
acgtctagaa

SEQ ID NO: 10256 - DNA, 10 bp, Artificial Sequence
  Synthetic Sequence
aagactagta

SEQ ID NO: 10257 - DNA, 10 bp, Artificial Sequence
  Synthetic Sequence
tcaagctaat

SEQ ID NO: 10258 - DNA, 10 bp, Artificial Sequence
  Synthetic Sequence
acggcggttc

SEQ ID NO: 10259 - DNA, 10 bp, Artificial Sequence
  Synthetic Sequence
tcgggaagcg

SEQ ID NO: 10260 - DNA, 10 bp, Artificial Sequence
  Synthetic Sequence
ggtatacacc

SEQ ID NO: 10261 - DNA, 10 bp, Artificial Sequence
  Synthetic Sequence
ggtgttggat

SEQ ID NO: 10262 - DNA, 10 bp, Artificial Sequence
  Synthetic Sequence
tagtggagga

SEQ ID NO: 10263 - DNA, 10 bp, Artificial Sequence
  Synthetic Sequence
cacctaccgg

SEQ ID NO: 10264 - DNA, 10 bp, Artificial Sequence
  Synthetic Sequence
ccgtgctaat

SEQ ID NO: 10265 - DNA, 10 bp, Artificial Sequence
  Synthetic Sequence
ccagcgaacg

SEQ ID NO: 10266 - DNA, 10 bp, Artificial Sequence
  Synthetic Sequence
tctcccttct

SEQ ID NO: 10267 - DNA, 10 bp, Artificial Sequence
  Synthetic Sequence
tcttccatta

SEQ ID NO: 10268 - DNA, 10 bp, Artificial Sequence
  Synthetic Sequence
cgtggcgtct

SEQ ID NO: 10269 - DNA, 10 bp, Artificial Sequence
  Synthetic Sequence
gatactctca

SEQ ID NO: 10270 - DNA, 10 bp, Artificial Sequence
  Synthetic Sequence
aagattctcc

SEQ ID NO: 10271 - DNA, 10 bp, Artificial Sequence
  Synthetic Sequence
atgagtggcc

SEQ ID NO: 10272 - DNA, 10 bp, Artificial Sequence
  Synthetic Sequence
gcaatgccgc

SEQ ID NO: 10273 - DNA, 10 bp, Artificial Sequence
  Synthetic Sequence
atgccacatg

SEQ ID NO: 10274 - DNA, 10 bp, Artificial Sequence
  Synthetic Sequence
cacaggccag

SEQ ID NO: 10275 - DNA, 10 bp, Artificial Sequence
  Synthetic Sequence
gcgaagccat

SEQ ID NO: 10276 - DNA, 10 bp, Artificial Sequence
  Synthetic Sequence
gatctgcggg

SEQ ID NO: 10277 - DNA, 10 bp, Artificial Sequence
  Synthetic Sequence
gagcctgaaa

SEQ ID NO: 10278 - DNA, 10 bp, Artificial Sequence
  Synthetic Sequence
ctgcgtctga

SEQ ID NO: 10279 - DNA, 10 bp, Artificial Sequence
  Synthetic Sequence
cacagaaccc

SEQ ID NO: 10280 - DNA, 10 bp, Artificial Sequence
  Synthetic Sequence
atcttccgta

SEQ ID NO: 10281 - DNA, 10 bp, Artificial Sequence
  Synthetic Sequence
aggtcagcac

SEQ ID NO: 10282 - DNA, 10 bp, Artificial Sequence
  Synthetic Sequence
agaataatca

SEQ ID NO: 10283 - DNA, 10 bp, Artificial Sequence
  Synthetic Sequence
tctgggtgcc

SEQ ID NO: 10284 - DNA, 10 bp, Artificial Sequence
  Synthetic Sequence
aagttaatcg

SEQ ID NO: 10285 - DNA, 10 bp, Artificial Sequence
  Synthetic Sequence
tggcactcga

SEQ ID NO: 10286 - DNA, 10 bp, Artificial Sequence
  Synthetic Sequence
gaataaacta

SEQ ID NO: 10287 - DNA, 10 bp, Artificial Sequence
  Synthetic Sequence
caagacacca

SEQ ID NO: 10288 - DNA, 10 bp, Artificial Sequence
  Synthetic Sequence
acgtgttgtt

SEQ ID NO: 10289 - DNA, 10 bp, Artificial Sequence
  Synthetic Sequence
cagctaggct

SEQ ID NO: 10290 - DNA, 10 bp, Artificial Sequence
  Synthetic Sequence
gtcaaggtag

SEQ ID NO: 10291 - DNA, 10 bp, Artificial Sequence
  Synthetic Sequence
ggtgaagcta

SEQ ID NO: 10292 - DNA, 10 bp, Artificial Sequence
  Synthetic Sequence
ccacgctaga

SEQ ID NO: 10293 - DNA, 10 bp, Artificial Sequence
  Synthetic Sequence
gctggaaatg

SEQ ID NO: 10294 - DNA, 10 bp, Artificial Sequence
  Synthetic Sequence
ctagcggtcc

SEQ ID NO: 10295 - DNA, 10 bp, Artificial Sequence
  Synthetic Sequence
accgtttgga

SEQ ID NO: 10296 - DNA, 10 bp, Artificial Sequence
  Synthetic Sequence
cgacagaacg

SEQ ID NO: 10297 - DNA, 10 bp, Artificial Sequence
  Synthetic Sequence
gctgccgatc

SEQ ID NO: 10298 - DNA, 10 bp, Artificial Sequence
  Synthetic Sequence
caactcttgc

SEQ ID NO: 10299 - DNA, 10 bp, Artificial Sequence
  Synthetic Sequence
gtatgccgaa

SEQ ID NO: 10300 - DNA, 10 bp, Artificial Sequence
  Synthetic Sequence
atgggcgtta

SEQ ID NO: 10301 - DNA, 10 bp, Artificial Sequence
  Synthetic Sequence
ttgaaatcta

SEQ ID NO: 10302 - DNA, 10 bp, Artificial Sequence
  Synthetic Sequence
tctaggaaat

SEQ ID NO: 10303 - DNA, 10 bp, Artificial Sequence
  Synthetic Sequence
tagtcatgag

SEQ ID NO: 10304 - DNA, 10 bp, Artificial Sequence
  Synthetic Sequence
atggtccgcg

SEQ ID NO: 10305 - DNA, 10 bp, Artificial Sequence
  Synthetic Sequence
tgaaagcttc

SEQ ID NO: 10306 - DNA, 10 bp, Artificial Sequence
  Synthetic Sequence
caaacagatc

SEQ ID NO: 10307 - DNA, 10 bp, Artificial Sequence
  Synthetic Sequence
atagtctgct

SEQ ID NO: 10308 - DNA, 10 bp, Artificial Sequence
  Synthetic Sequence
caaattaggg

SEQ ID NO: 10309 - DNA, 10 bp, Artificial Sequence
  Synthetic Sequence
aggcagtcca

SEQ ID NO: 10310 - DNA, 10 bp, Artificial Sequence
  Synthetic Sequence
cgcctggaac

SEQ ID NO: 10311 - DNA, 10 bp, Artificial Sequence
  Synthetic Sequence
caaccgttat

SEQ ID NO: 10312 - DNA, 10 bp, Artificial Sequence
  Synthetic Sequence
actctaacgt

SEQ ID NO: 10313 - DNA, 10 bp, Artificial Sequence
  Synthetic Sequence
agtggacgga

SEQ ID NO: 10314 - DNA, 10 bp, Artificial Sequence
  Synthetic Sequence
tcttaaaggc

SEQ ID NO: 10315 - DNA, 10 bp, Artificial Sequence
  Synthetic Sequence
atggaacagc

SEQ ID NO: 10316 - DNA, 10 bp, Artificial Sequence
  Synthetic Sequence
tacccacagg

SEQ ID NO: 10317 - DNA, 10 bp, Artificial Sequence
  Synthetic Sequence
ccttgaaagt

SEQ ID NO: 10318 - DNA, 10 bp, Artificial Sequence
  Synthetic Sequence
gcagtgctcc

SEQ ID NO: 10319 - DNA, 10 bp, Artificial Sequence
  Synthetic Sequence
cgtaaacgtc

SEQ ID NO: 10320 - DNA, 10 bp, Artificial Sequence
  Synthetic Sequence
attggtaacc

SEQ ID NO: 10321 - DNA, 10 bp, Artificial Sequence
  Synthetic Sequence
gcggcgttag

SEQ ID NO: 10322 - DNA, 10 bp, Artificial Sequence
  Synthetic Sequence
ttatttacgc

SEQ ID NO: 10323 - DNA, 10 bp, Artificial Sequence
  Synthetic Sequence
gagaacactc

SEQ ID NO: 10324 - DNA, 10 bp, Artificial Sequence
  Synthetic Sequence
taagcctgag

SEQ ID NO: 10325 - DNA, 10 bp, Artificial Sequence
  Synthetic Sequence
acgtggtcga

SEQ ID NO: 10326 - DNA, 10 bp, Artificial Sequence
  Synthetic Sequence
ggtgtagtgg

SEQ ID NO: 10327 - DNA, 10 bp, Artificial Sequence
  Synthetic Sequence
catataatta

SEQ ID NO: 10328 - DNA, 10 bp, Artificial Sequence
  Synthetic Sequence
gatcgggttt

SEQ ID NO: 10329 - DNA, 10 bp, Artificial Sequence
  Synthetic Sequence
caacctgcga

SEQ ID NO: 10330 - DNA, 10 bp, Artificial Sequence
  Synthetic Sequence
ccaccgacca

SEQ ID NO: 10331 - DNA, 10 bp, Artificial Sequence
  Synthetic Sequence
ggataggctg

SEQ ID NO: 10332 - DNA, 10 bp, Artificial Sequence
  Synthetic Sequence
aactacaatt

SEQ ID NO: 10333 - DNA, 10 bp, Artificial Sequence
  Synthetic Sequence
atagttcatc

SEQ ID NO: 10334 - DNA, 10 bp, Artificial Sequence
  Synthetic Sequence
caaattctca

SEQ ID NO: 10335 - DNA, 10 bp, Artificial Sequence
  Synthetic Sequence
agccttcgtc

SEQ ID NO: 10336 - DNA, 10 bp, Artificial Sequence
  Synthetic Sequence
acaacagctt

SEQ ID NO: 10337 - DNA, 10 bp, Artificial Sequence
  Synthetic Sequence
tcatgtatgg

SEQ ID NO: 10338 - DNA, 10 bp, Artificial Sequence
  Synthetic Sequence
tccgggagtt

SEQ ID NO: 10339 - DNA, 10 bp, Artificial Sequence
  Synthetic Sequence
tggactccgg

SEQ ID NO: 10340 - DNA, 10 bp, Artificial Sequence
  Synthetic Sequence
ctgccatata

SEQ ID NO: 10341 - DNA, 10 bp, Artificial Sequence
  Synthetic Sequence
tccaatgtaa

SEQ ID NO: 10342 - DNA, 10 bp, Artificial Sequence
  Synthetic Sequence
tgccacaggt

SEQ ID NO: 10343 - DNA, 10 bp, Artificial Sequence
  Synthetic Sequence
aggattagag

SEQ ID NO: 10344 - DNA, 10 bp, Artificial Sequence
  Synthetic Sequence
tagtgcatct

SEQ ID NO: 10345 - DNA, 10 bp, Artificial Sequence
  Synthetic Sequence
gataagtaac

SEQ ID NO: 10346 - DNA, 10 bp, Artificial Sequence
  Synthetic Sequence
gtatcggtac

SEQ ID NO: 10347 - DNA, 10 bp, Artificial Sequence
  Synthetic Sequence
ctactgatga

SEQ ID NO: 10348 - DNA, 10 bp, Artificial Sequence
  Synthetic Sequence
agattaacta

SEQ ID NO: 10349 - DNA, 10 bp, Artificial Sequence
  Synthetic Sequence
agcttggtgg

SEQ ID NO: 10350 - DNA, 10 bp, Artificial Sequence
  Synthetic Sequence
ggtagcagaa

SEQ ID NO: 10351 - DNA, 10 bp, Artificial Sequence
  Synthetic Sequence
tcgctcgcca

SEQ ID NO: 10352 - DNA, 10 bp, Artificial Sequence
  Synthetic Sequence
ggaatttgta

SEQ ID NO: 10353 - DNA, 10 bp, Artificial Sequence
  Synthetic Sequence
ctttacgtaa

SEQ ID NO: 10354 - DNA, 10 bp, Artificial Sequence
  Synthetic Sequence
gtatgacaat

SEQ ID NO: 10355 - DNA, 10 bp, Artificial Sequence
  Synthetic Sequence
gggttccgag

SEQ ID NO: 10356 - DNA, 10 bp, Artificial Sequence
  Synthetic Sequence
ctctaaacat

SEQ ID NO: 10357 - DNA, 10 bp, Artificial Sequence
  Synthetic Sequence
gactttctta

SEQ ID NO: 10358 - DNA, 10 bp, Artificial Sequence
  Synthetic Sequence
cgagcaaccc

SEQ ID NO: 10359 - DNA, 10 bp, Artificial Sequence
  Synthetic Sequence
gcccactcca

SEQ ID NO: 10360 - DNA, 10 bp, Artificial Sequence
  Synthetic Sequence
tcggctttgc

SEQ ID NO: 10361 - DNA, 10 bp, Artificial Sequence
  Synthetic Sequence
cagctcacgc

SEQ ID NO: 10362 - DNA, 10 bp, Artificial Sequence
  Synthetic Sequence
tatgaccttc

SEQ ID NO: 10363 - DNA, 10 bp, Artificial Sequence
  Synthetic Sequence
ccagaggttg

SEQ ID NO: 10364 - DNA, 10 bp, Artificial Sequence
  Synthetic Sequence
gctaccgcct

SEQ ID NO: 10365 - DNA, 10 bp, Artificial Sequence
  Synthetic Sequence
gcggagcgtt

SEQ ID NO: 10366 - DNA, 10 bp, Artificial Sequence
  Synthetic Sequence
gtcgaattcg

SEQ ID NO: 10367 - DNA, 10 bp, Artificial Sequence
  Synthetic Sequence
tagtgcaatg

SEQ ID NO: 10368 - DNA, 10 bp, Artificial Sequence
  Synthetic Sequence
tatgagacta

SEQ ID NO: 10369 - DNA, 10 bp, Artificial Sequence
  Synthetic Sequence
caagttagtc

SEQ ID NO: 10370 - DNA, 10 bp, Artificial Sequence
  Synthetic Sequence
agtttactcg

SEQ ID NO: 10371 - DNA, 10 bp, Artificial Sequence
  Synthetic Sequence
ctgctacttc

SEQ ID NO: 10372 - DNA, 10 bp, Artificial Sequence
  Synthetic Sequence
caccgcataa

SEQ ID NO: 10373 - DNA, 10 bp, Artificial Sequence
  Synthetic Sequence
ccagattgag

SEQ ID NO: 10374 - DNA, 10 bp, Artificial Sequence
  Synthetic Sequence
tcctaactga

SEQ ID NO: 10375 - DNA, 10 bp, Artificial Sequence
  Synthetic Sequence
atcgagcatc

SEQ ID NO: 10376 - DNA, 10 bp, Artificial Sequence
  Synthetic Sequence
cagcagcgtt

SEQ ID NO: 10377 - DNA, 10 bp, Artificial Sequence
  Synthetic Sequence
acttggaggc

SEQ ID NO: 10378 - DNA, 10 bp, Artificial Sequence
  Synthetic Sequence
agggagctcg

SEQ ID NO: 10379 - DNA, 10 bp, Artificial Sequence
  Synthetic Sequence
cgtgatcaca

SEQ ID NO: 10380 - DNA, 10 bp, Artificial Sequence
  Synthetic Sequence
ctatagtgca

SEQ ID NO: 10381 - DNA, 10 bp, Artificial Sequence
  Synthetic Sequence
ttcctttatc

SEQ ID NO: 10382 - DNA, 10 bp, Artificial Sequence
  Synthetic Sequence
ttggtcattt

SEQ ID NO: 10383 - DNA, 10 bp, Artificial Sequence
  Synthetic Sequence
tcccagtcga

SEQ ID NO: 10384 - DNA, 10 bp, Artificial Sequence
  Synthetic Sequence
agtggcattt

SEQ ID NO: 10385 - DNA, 10 bp, Artificial Sequence
  Synthetic Sequence
taactagggt

SEQ ID NO: 10386 - DNA, 10 bp, Artificial Sequence
  Synthetic Sequence
ggcgatcatt

SEQ ID NO: 10387 - DNA, 10 bp, Artificial Sequence
  Synthetic Sequence
cacagactcg

SEQ ID NO: 10388 - DNA, 10 bp, Artificial Sequence
  Synthetic Sequence
gcctgcacac

SEQ ID NO: 10389 - DNA, 10 bp, Artificial Sequence
  Synthetic Sequence
atgaagttca

SEQ ID NO: 10390 - DNA, 10 bp, Artificial Sequence
  Synthetic Sequence
gttcatatcg

SEQ ID NO: 10391 - DNA, 10 bp, Artificial Sequence
  Synthetic Sequence
gctgaagccc

SEQ ID NO: 10392 - DNA, 10 bp, Artificial Sequence
  Synthetic Sequence
tgggtcaccg

SEQ ID NO: 10393 - DNA, 10 bp, Artificial Sequence
  Synthetic Sequence
attctgacga

SEQ ID NO: 10394 - DNA, 10 bp, Artificial Sequence
  Synthetic Sequence
gggtaatctc

SEQ ID NO: 10395 - DNA, 10 bp, Artificial Sequence
  Synthetic Sequence
gaaacttaat

SEQ ID NO: 10396 - DNA, 10 bp, Artificial Sequence
  Synthetic Sequence
gaggagagaa

SEQ ID NO: 10397 - DNA, 10 bp, Artificial Sequence
  Synthetic Sequence
gttacaggaa

SEQ ID NO: 10398 - DNA, 10 bp, Artificial Sequence
  Synthetic Sequence
ggcggaataa

SEQ ID NO: 10399 - DNA, 10 bp, Artificial Sequence
  Synthetic Sequence
caatctagac

SEQ ID NO: 10400 - DNA, 10 bp, Artificial Sequence
  Synthetic Sequence
taaagtatgt

SEQ ID NO: 10401 - DNA, 10 bp, Artificial Sequence
  Synthetic Sequence
tattgtggat

SEQ ID NO: 10402 - DNA, 10 bp, Artificial Sequence
  Synthetic Sequence
gtcggctaac

SEQ ID NO: 10403 - DNA, 10 bp, Artificial Sequence
  Synthetic Sequence
ccatcgccag

SEQ ID NO: 10404 - DNA, 10 bp, Artificial Sequence
  Synthetic Sequence
gggaagaccg

SEQ ID NO: 10405 - DNA, 29 bp, Artificial Sequence
  Synthetic Sequence
aatgatacggcgaccaccgagatctacac

SEQ ID NO: 10406 - DNA, 24 bp, Artificial Sequence
  Synthetic Sequence
atctcgtatgccgtcttctgcttg

SEQ ID NO: 10407 - DNA, 18 bp, Artificial Sequence
  Synthetic Sequence
ttggagtacgctggatag

SEQ ID NO: 10408 - DNA, 90 bp, Artificial Sequence
  Synthetic Sequence
  misc_feature (65)..(78): n is a, c, g, or t
atctttggagtacgctggatagcctccaggccagaaagaggcgtcagatgtgtataagagacagnnnnnnnnnnnnnntccggtcagttg

SEQ ID NO: 10409 - DNA, 22 bp, Artificial Sequence
  Synthetic Sequence
cagtctacacatattctctgtc

SEQ ID NO: 10410 - DNA, 70 bp, Artificial Sequence
  Synthetic Sequence
aatgatacggcgaccaccgagatctacacattctgcatcgtcggcagcgtcagatgtgtataagagacag

SEQ ID NO: 10411 - DNA, 94 bp, Artificial Sequence
  Synthetic Sequence
  misc_feature (65)..(78): n is a, c, g, or t
atctttggagtacgctggatagcctccaggccagaaagaggcgtcagatgtgtataagagacagnnnnnnnnnnnnnntccggtcagttgtttt

SEQ ID NO: 10412 - DNA, 100 bp, Artificial Sequence
  Synthetic Sequence
  misc_feature (99)..(99): A, C or G
  misc_feature (100)..(100): A, T, C or G
caagcagaagacggcatacgagatcagatatcgtctcgtgggctcggagatgtgtataagagacagaaaaaaaaaaaaaaaaaaaaaaaaaaaaaaaann
